United States Patent Application Publication US 2021/0247394 A1 - sequence listing, part 2

SEQ ID NO: 1 - DNA, 4913040 bp, Escherichia coli (residues 1,637,681-3,275,360 of 4,913,040)
  modified_base (1004902)..(1005000): a, c, t, g, unknown or other
  modified_base (2674793)..(2674889): a, c, t, g, unknown or other
  modified_base (3346738)..(3346746): a, c, t, g, unknown or other
  modified_base (4136806)..(4136812): a, c, t, g, unknown or other
  modified_base (4610591)..(4610688): a, c, t, g, unknown or other
  modified_base (4885427)..(4885828): a, c, t, g, unknown or other
caccgttactgaaaaatattctgcaaagcggcgaacgtatcgtgcgtgtgagtcaggaaggcaaaccgtcggaaacacgctttaaagtggaagaacgctatgcatttgccaccctggtgcgttgtagcccggtaacagggcgtactcaccagatccgtgtgcatacacaatatgcgggtcatccgattgcctttgacgatcgctacggtgaccgtgaatttgacaggcagctcactgaagcaggcacgggattaaatcgcctgttcctgcacgctgcagcgttgaagtttactcatccggggaccggtgaggtgatgcgtatcgaagctccgatggatgaaggtttgaagcgttgtttgcaaaagctgcgtaacgcgcgctaatacaagcatataaacctgataatgggcggttggcctgataaggcgtttacgccgcatcaggccgccagcaccgattgccggatgcgacgtaaccacatccggcgcaaaaaactatcccatcagcgggtttttcccttcccgacgtaacatctgacacagcgcgattagcggtaaaccaaccagcgtgttaggatcacgcccctctaaacgctcaaacagcgtaatgccaaatccttcactcttaaagctacccgcgcagtgcaggggatgctctttacgcacgtaattatcaatctccgcctcgctcaggtgacggaaatggacgtcaaaaggctccacttctgtttgcagatgcccattcgccgaattaaacaacgccagtccagtatagaaggtgacgatattgccgctggctttgcgtaattgcagacgggcattttcttccgttaacggtttaccggtgatttcgccatcaagaacacatacctggtctgaaccaataattaaatgatccggataacgtgacgccagagattgcgctttttcttgtgccagtcgaagcaccaactgtcgcggtgattcgtcgctgcgtggggtttcgtcgacctctggtgctgcacattcaaaagagatttgcagtttttccagaagagcgcgacgccatggcgaggtggaggctaaaataagtttaggcatatttttttccatcagatatagcgtattgatgatagccattttaaactatgcgcttcgttttgcaggttgatgtttgttatcagcactgaacgaaaataaagcagtaacccgcaatgtgtgcgaattattggcaaaaggcaaccacaggctgcctttttctttgactctatgacgttacaaagttaatatgcgcgccctatgcaaaaggtaaaattacccctgactctcgatccggttcgtacggctcaaaaacgccttgattaccagggtatctatacccctgatcaggttgagcgcgtcgccgaatccgtagtcagtgtggacagtgatgtggaatgctccatgtcgttcgctatcgataaccaacgtctcgcagtgttaaacggcgatgcgaaggtgacggtaacgctcgagtgtcagcgttgcgggaagccgtttactcatcaggtctacacaacgtattgttttagtcctgtgcgttcagacgaacaggctgaagcactgccggaagcgtatgaaccgattgaggttaacgaattcggtgaaatcgatctgcttgcaatggttgaagatgaaatcatcctcgccttgccggtagttccggtgcatgattctgaacactgtgaagtgtccgaagcggacatggtctttggtgaactgcctgaagaagcgcaaaagccaaacccatttgccgtattagccagcttaaagcgtaagtaattggtgctccccgttggatcggggataaaccgtaattgaggagtaaggtccatggccgtacaacagaataaaccaacccgttccaaacgtggcatgcgtcgttcccatgacgcgctgaccgcagtcaccagcctgtctgtagacaaaacttctggtgaaaaacacctgcgtcaccacatcactgccgacggttactaccgcggccgcaaggtcatcgctaagtaatcacgcatctgcgtgatgaagcttagtgaggattttccccaggcaactggggaaagaccaaaccgggcggcgacgataccttgacacgtctaaccctggcgttagatgtcatgggaggggattttggcccttccgtgacagtgcctgcagcattgcaggcactgaattctaattcgcaactcactcttcttttagtcggcaatcccgacgccatcacgccattacttgctaaagctgactttgaacaacgttcgcgtctgcagattattcctgcgcagtcagttatcgccagtgatgcccggccttcgcaagctatccgcgccagtcgtgggagttcaatgcgcgtggccctggagctggtgaaagaaggtcgagcgcaagcctgtgtcagtgccggtaataccggggcgctgatggggctggcaaaattattactcaagcccctggaggggattgagcgtccggcgctggtgacggtattaccacatcagcaaaagggcaaaacggtggtccttgacttaggggccaacgtcgattgtgacagcacaatgctggtgcaatttgccattatgggctcagttctggctgaagaggtggtggaaattcccaatcctcgcgtggcgttgctcaatattggtgaagaagaagtaaagggtctcgacagtattcgggatgcctcagcggtgcttaaaacaatcccttctatcaattatatcggctatcttgaagccaatgagttgttaactggcaagacagatgtgctggtttgtgacggctttacaggaaatgtcacattaaagacgatggaaggtgttgtcaggatgttcctttctctgctgaaatctcagggtgaagggaaaaaacggtcgtggtggctactgttattaaagcgttggctacaaaagagcctgacgaggcgattcagtcacctcaaccccgaccagtataacggcgcctgtctgttaggattgcgcggcacggtgataaaaagtcatggtgcagccaatcagcgagcttttgcggtcgcgattgaacaggcagtgcaggcggtgcagcgacaagttcctcagcgaattgccgctcgcctggaatctgtatacccagctggttttgagctgctggacggtggcaaaagcggaactctgcggtagcaggacgctgccagcgaactcgcagtttgcaagtgacggtatataaccgaaaagtgactgagcgtacatgtatacgaagattattggtactggcagctatctgcccgaacaagtgcggacaaacgccgatttggaaaaaatggtggacacctctgacgagtggattgtcactcgtaccggtatccgcgaacgccacattgccgcgccaaacgaaaccgtttcaaccatgggctttgaagcggcgacacgcgcaattgagatggcgggcattgagaaagaccagattggcctgatcgttgtggcaacgacttctgctacgcacgctttcccgagcgcagcttgtcagattcaaagcatgttgggcattaaaggttgcccggcatttgacgttgcagcagcctgcgcaggtttcacctatgcattaagcgtagccgatcaatacgtgaaatctggggcggtgaagtatgctctggtcgtcggttccgatgtactggcgcgcacctgcgatccaaccgatcgtgggactattattatttttggcgatggcgcgggcgctgcggtgctggctgcctctgaagagccgggaatcatttccacccatctgcatgccgacggtagttatggtgaattgctgacgctgccaaacgccgaccgcgtgaatccagagaattcaattcatctgacgatggcgggcaacgaagtcttcaaggttgcggtaacggaactggcgcacatcgttgatgagacgctggcggcgaataatcttgaccgttctcaactggactggctggttccgcatcaggctaacctgcgtattatcagtgcaacggcgaaaaaactcggtatgtctatggataatgtcgtggtgacgctggatcgccacggtaatacctctgcggcctctgtcccgtgcgcgctggatgaagctgtacgcgacgggcgcattaagccggggcagttggttctgcttgaagcctttggcggtggattcacctggggctccgcgctggttcgtttctaggataaggattaaaacatgacgcaatttgcatttgtgttccctggacagggttctcaaaccgttggaatgctggctgatatggcggcgagctatccaattgtcgaagaaacgtttgctgaagcttctgcggcgctgggctacgacctgtgggcgctgacccagcaggggccagctgaagaactgaataaaacctggcaaactcagcctgcgctgttgactgcatctgttgcgctgtatcgcgtatggcagcagcagggcggtaaagcaccggcaatgatggccggtcacagcctgggggaatactccgcgctggtttgcgctggtgtgattgatttcgctgatgcggtgcgtctggttgagatgcgcggcaagttcatgcaagaagccgtaccggaaggcacgggcgctatggcggcaatcatcggtctggatgatgcgtctattgcgaaagcgtgtgaagaagctgcagaaggtcaggtcgtttctccggtaaactttaactctccgggacaggtggttattgccggtcataaagaagcggttgagcgtgctggcgctgcctgtaaagcggcgggcgcaaaacgcgcgctgccgttaccagtgagcgtaccgtctcactgtgcgctgatgaaaccagcagccgacaaactggcagtagaattagcgaaaatcacctttaacgcaccaacagttcctgttgtgaataacgttgatgtgaaatgcgaaaccaatggtgatgccatccgtgacgcactggtacgtcagttgtataacccggttcagtggacgaagtctgttgagtacatggcagcgcaaggcgtagaacatctctatgaagtcggcccgggcaaagtgcttactggcctgacgaaacgcattgtcgacaccctgaccgcctcggcgctgaacgaaccttcagcgatggcagcggcgctcgagctttaaaagaggaaaatcatgaattttgaaggaaaaatcgcactggtaaccggtgcaagccgcggaattggccgcgcaattgctgaaacgctcgcagcccgtggcgcgaaagttattggcactgcgaccagtgaaaatggcgctcaggcgatcagtgattatttaggtgccaacggcaaaggtctgatgttgaatgtgaccgacccggcatctatcgaatctgttctggaaaaaattcgcgcagaatttggtgaagtggatatcctggtcaataatgccggtatcactcgtgataacctgttaatgcgaatgaaagatgaagagtggaacgatattatcgaaaccaacctttcatctgttttccgtctgtcaaaagcggtaatgcgcgctatgatgaaaaagcgtcatggtcgtattatcactatcggttctgtggttggtaccatgggaaatggcggtcaggccaactacgctgcggcgaaagcgggcttgatcggcttcagtaaatcactggcgcgcgaagttgcgtcacgcggtattactgtaaacgttgttgctccgggctttattgaaacggacatgacacgtgcgctgagcgatgaccagcgtgcgggtatcctggcgcaggttcctgcgggtcgcctcggcggcgcacaggaaatcgccaacgcggttgcattcctggcatccgacgaagcagcttacatcacgggtgaaactttgcatgtgaacggcgggatgtacatggtctgaccgcgatttgcacaaaatgctcatgttgcgcgcagtctgcgtggttatgagtaataattagtgcaaaatgatttgcgttattggggggtaaggcctcaaaataacgtaaaatcgtggtaagacctgccgggatttagttgcaaatttttcaacattttatacactacgaaaaccatcgcgaaagcgagttttgataggaaatttaagagtatgagcactatcgaagaacgcgttaagaaaattatcggcgaacagctgggcgttaagcaggaagaagttaccaacaatgcttctttcgttgaagacctgggcgcggattctcttgacaccgttgagctggtaatggctctggaagaagagtttgatactgagattccggacgaagaagctgagaaaatcaccaccgttcaggctgccattgattacatcaacggccaccaggcgtaagtgaacatctccaggcggtcgttcgaccgcctgagttttatctttttgtcccactagaatcattttttccctccctggaggacaaacgtgtctaagcgtcgtgtagttgtgaccggactgggcatgttgtctcctgtcggcaataccgtagagtctacctggaaagctctgcttgccggtcagagtggcatcagcctaatcgaccatttcgatactagcgcctatgcaacgaaatttgctggcttagtaaaggattttaactgtgaggacattatctcgcgcaaagaacagcgcaagatggatgccttcattcaatatggaattgtcgctggcgttcaggccatgcaggattctggccttgaaataacggaagagaacgcaacccgcattggtgccgcaattggctccgggattggcggcctcggactgatcgaagaaaaccacacatctctgatgaacggtggtccacgtaagatcagcccattcttcgttccgtcaacgattgtgaacatggtggcaggtcatctgactatcatgtatggcctgcgtggcccgagcatctctatcgcgactgcctgtacttccggcgtgcacaacattggccatgctgcgcgtattatcgcgtatggcgatgctgacgtgatggttgcaggtggcgcagagaaagccagtacgccgctgggcgttggtggttttggcgcggcacgtgcattatctacccgcaatgataacccgcaagcggcgagccgcccgtgggataaagagcgtgatggtttcgtactgggcgatggtgccggtatgctggtacttgaagagtacgaacacgcgaaaaaacgcggtgcgaaaatttacgctgaactcgtcggctttggtatgagcagcgatgcttatcatatgacgtcaccgccagaaaatggcgcaggcgcagctctggcgatggcaaatgctctgcgtgatgcaggcattgaagcgagtcagattggctacgttaacgcgcacggtacttctacgccggctggcgataaagctgaagcgcaggcggtgaaaaccatcttcggtgaagctgcaagccgtgtgttggtaagctccacgaaatctatgaccggtcacctgttaggtgcggcgggtgcagtagaatctatctactccatcctggcgctgcgcgatcaggctgttccgccaaccatcaacctggataacccggatgaaggttgcgatctggatttcgtaccgcacgaagcgcgtcaggttagcggaatggaatacactctgtgtaactccttcggcttcggtggcactaatggttctttgatctttaaaaagatctaagttgtcattttccacccttataaaaggtccgcttgcgggccttttttcttagcttttattccgacttgttccgtagtgaacatgctgccacactaacaattctctgataaggagccggtatgttcttaattaacggtcataagcaggaatcgctggcagtaagcgatcgggcaacgcagtttggtgatggttgttttaccaccgccagagttatcgacggtaaagtcagtttgttatcggcgcatatccagcgactacaggatgcttgtcagcggttgatgatttcctgtgacttctggcctcagcttgaacaagagatgaaaacgctggcagcagaacagcaaaatggtgtgctgaaagtcgtgatcagtcgcggtagtggcgggcgagggtacagcacattgaacagcggaccggcaacgcggattctctccgttacggcttatcctgcacattacgaccgtttgcgtaacgaggggattacgttggcgctaagcccggtgcggctggggcgcaatcctcatcttgcaggtattaaacatctcaatcgtcttgagcaagtattgattcgctctcatcttgagcagacaaacgctgatgaggcgctggtccttgacagcgaagggtgggttacggaatgctgtgcggctaatttgttctggcggaagggcaacgtagtttatacgccgcgactggatcaggctggtgttaacggcattatgcgacaattctgtatccgtttgctggcacaatcctcttatcagcttgtcgaagtgcaagcctctctggaagagtcgttgcaggcagatgagatggttatttgtaatgcgttaatgccagtgatgcccgtatgtgcctgtggcgatgtctccttttcgtcagcaacgttatatgaatatttagccccactttgtgagcgcccgaattagtcatgaaaaaagtgttattgataatcttgttattgctggtggtactgggtatcgccgctggtgtgggcgtctggaaggttcgccatcttgccgacagcaaattgcttatcaaagaagagacgatatttaccctgaagccagggaccggacgtctggcgctcggtgaacagctttatgccgataagatcatcaatcgtccacgggtttttcaatggctgctgcgtatcgaaccggatctttctcactttaaagccgggacttaccgctttacaccgcagatgaccgtgcgcgagatgctgaaattgctggaaagcggtaaagaagcacagttccctctgcgactggtagaagggatgcgtctgagcgattacctcaagcaattgcgtgaggccccgtatatcaagcatacgctgagcgatgataagtacgccaccgtagcgcaggcacttgaactggaaaacccggagtggattgaaggttggttctggccagacacctggatgtataccgccaataccaccgatgtcgcgttactcaagcgagcgcacaagaaaatggtgaaagcggtcgatagcgcctgggaagggcgtgcggacggtctgccttataaagataaaaaccagttggtgacgatggcatcaattatcgaaaaagaaaccgccgttgccagtgaacgcgataaggttgcctcagtatttatcaaccgtttacgcattggtatgcgcctgcagaccgacccgaccgtgatttacgggatgggagagcgttataatggcaaactttctcgtgcagacctggaaacgccgacagcgtataacacctataccattaccggtctgccgccaggtgcgatagcgacgccgggggcggattcgctgaaggctgctgcgcatccggcaaaaacgccgtatctctattttgtggccgatggtaaaggtggtcacacgtttaataccaatcttgccagtcataacaagtctgtgcaggattatctgaaagtgcttaaggaaaaaaatgcgcagtaagtatatcgtcattgaggggctggaaggcgcaggcaaaactaccgcgcgtaatgtggtggttgagacgctcgagcaactgggtatccgcgacatggttttcactcgggaacctggcggtacgcaacttgccgaaaagttaagaagcctggtgctggatatcaaatcggtaggcgatgaagtcattaccgataaagccgaagttctgatgttttatgccgcgcgcgttcaactggtagaaacggtcatcaaaccagctctggctaacggcacctgggtgattggcgatcgccacgatctctccactcaggcgtatcagggcggcggacgtggtattgaccaacatatgctggcaacactgcgtgatgctgttctcggggattttcgccccgacttaacgctctatctcgatgttaccccggaagttggcttaaaacgcgcgcgtgcgcgcggcgagctggatcgtattgagcaagaatctttcgatttctttaatcgcacccgcgcccgctatctggaactggcagcacaagataaaagcattcataccattgatgccacccagccgctggaggccgtgatggatgcaatccgcactaccgtgacccactgggtgaaggagttggacgcatgagatggtatccatggttacgacctgatttcgaaaaactggtagccagctatcaggccggaagaggtcaccatgcgctactcattcaggcgttaccgggcatgggcgatgatgctttaatctacgccctgagccgttatttactctgccaacaaccgcagggccacaaaagttgcggtcactgtcgtggatgtcagttgatgcaggctggcacgcatcccgattactacaccctggctcccgaaaaaggaaaaaatacgctgggcgttgatgcggtacgtgaggtcaccgaaaagctgaatgagcacgcacgcttaggtggtgcgaaagtcgtttgggtaaccgatgctgccttactaaccgacgccgcggctaacgcattgctgaaaacgcttgaagagccaccagcagaaacctggtttttcctggctacccgcgagcctgaacgtttactggcaacattacgtagtcgttgtcggttacattaccttgcgccgccgccggaacagtacgccgtgacctggctttcacgcgaagtgacaatgtcacaggatgcattacttgccgcattgcgcttaagcgccggttcgcctggcgcggcactggcgttgtttcagggagataactggcaggctcgtgaaacattgtgtcaggcgttggcatatagcgtgccatcgggcgactggtattcgctgctagcggcccttaatcatgaacaagctccggcgcgtttacactggctggcaacgttgctgatggatgcgctaaaacgccatcatggtgctgcgcaggtgaccaatgttgatgtgccgggcctggtcgccgaactggcaaaccatctttctccctcgcgcctgcaggctatactgggggatgtttgccacattcgtgaacagttaatgtctgttacaggcatcaaccgcgagcttctcatcaccgatcttttactgcgtattgagcattacctgcaaccgggcgttgtgctaccggttcctcatctttaagagagacatcatgtttttagtcgactcacactgccatctcgatggtctggattatgaatctttgcataaggacgtggatgacgttctggcgaaagccgccgcacgcgatgtgaaattttgtctggcagtcgccacaacattaccgggttatttacatatgcgggatctggtaggcgaacgtgacaacgtcgtattttcttgtggcgtgcatccactcaaccagaatgatccctacgatgtagaagatttacgccgtctggcggcagaagagggtgttgtagcgctgggtgaaaccgggctggattattattacacgccggaaactaaagtacgtcagcaagagtccttcatccatcatatccagattggtcgtgaactgaacaagccggttatcgtccatacccgtgacgcccgtgccgatacgctggcaattctgcgcgaagaaaaagtgacggattgcggtggcgtactacactgttttacagaggacagagaaacggcgggtaaattactggatctcggattttacatctccttttccggcattgtgaccttccgtaatgcggagcaactgcgcgatgctgcgcgttatgtccccctggatcggttactggtggaaactgactcaccttaccttgcgccggtaccgcatcgaggaaaagagaatcaacctgcgatggttcgtgacgttgcagaatacatggctgtgttgaaaggtgttgccgttgaagaactggcgcaggtaaccaccgataacttcgcccgtctgtttcacatcgacgcttcccgccttcaatccatccgttgaatgagtttttttaaagctcgtaattaatggctaaaacgagtaaagttcaccgccgaaaattgggcggtgaataaccacgtttgaaatattgtgacatatgttttgtcaaaatgtgcaacttctccaatgatctgaagttgaaacgtgatagccgtcaaacaaattggcactgaattattttactctgtgtaataaataaagggcgcttagatgccctgtacacggcgaggctctccccccttgccacgcgtgagaacgtaaaaaaagcacccatactcaggagcactctcaattatgtttaagaatgcatttgctaacctgcaaaaggtcggtaaatcgctgatgctgccggtatccgtactgcctatcgcaggtattctgctgggcgtcggttccgcgaatttcagctggctgcccgccgttgtatcgcatgttatggcagaagcaggcggttccgtctttgcaaacatgccactgatttttgcgatcggtgtcgccctcggctttaccaataacgatggcgtatccgcgctggccgcagttgttgcctatggcatcatggttaaaaccatggccgtggttgcgccactggtactgcatttacctgctgaagaaatcgcctctaaacacctggcggatactggcgtactcggagggattatctccggtgcgatcgcagcgtacatgtttaaccgtttctaccgtattaagctgcctgagtatcttggcttctttgccggtaaacgctttgtgccgatcatttctggcctggctgccatctttactggcgttgtgctgtccttcatttggccgccgattggttctgcaatccagaccttctctcagtgggctgcttaccagaacccggtagttgcgtttggcatttacggtttcatcgaacgttgcctggtaccgtttggtctgcaccacatctggaacgtacctttccagatgcagattggtgaatacaccaacgcagcaggtcaggttttccacggcgacattccgcgttatatggcgggtgacccgactgcgggtaaactgtctggtggcttcctgttcaaaatgtacggtctgccagctgccgcaattgctatctggcactctgctaaaccagaaaaccgcgcgaaagtgggcggtattatgatctccgcggcgctgacctcgttcctgaccggtatcaccgagccgatcgagttctccttcatgttcgttgcgccgatcctgtacatcatccacgcgattctggcaggcctggcattcccaatctgtattcttctggggatgcgtgacggtacgtcgttctcgcacggtctgatcgacttcatcgttctgtctggtaacagcagcaaactgtggctgttcccgatcgtcggtatcggttatgcgattgtttactacaccatcttccgcgtgctgattaaagcactggatctgaaaacgccgggtcgtgaagacgcgactgaagatgcaaaagcgacaggtaccagcgaaatggcaccggctctggttgctgcatttggtggtaaagaaaacattactaacctcgacgcatgtattacccgtctgcgcgtcagcgttgctgatgtgtctaaagtggatcaggccggcctgaagaaactgggcgcagcgggcgtagtggttgctggttctggtgttcaggcgattttcggtactaaatccgataacctgaaaaccgagatggatgagtacatccgtaaccactaatccgtaagacgttggggagactaaggcagccagatggctgccttttttacaggtgttattcagaattgatacgtgccggtaatgctgaaattacgcggtgtgccgtagacgatagaaccttccacgttggtatcgtaggttttgtcgaacaggttattgacgttcccctgtaacgagaagtttttcgtcacctggtagcgggtgaagagatccaccagcgcgtagctaccttgctcggcgcggaaggtgccatacggcgtcacggtgtcggtatacacgcgattttgccagttaacaccaccgccgaccgtcaactctggcatgacaggcaaccgatagctggtgaacattttaaccgtggtgcgtggcagattaggattaacggcgtttccttcgttatcctctgcaatatagcgcgttgcgccaaatgtcagctgccagttgtcggtaattgcgccgttgagttcaaattccacccctttactgactgtcccatccaccgctttataggcggtttcgccgttgctgccggggataggtgtaccggtggactgagcgacattatcctgctcaatacggaagatggctaacgtggtggtcagacggctattcatccagtccgatttcagacccagctcgtagttgttaccggtgattggagccagatatttgcctgaactgtcacgatcattttgcggctggaaaatagaggtatagctggcgtaggtcgaccagttgtcattgatgtcaaacaccagaccagcgtaaggcgtggtgtggtttttctccatgctgtaagtcagcgtatcaacccgccagttggtataacgtgcgccgaggatcagatgcagcggatcggcaagggtgacacgagtggcagcatataacgatttcatatgtgtggtatcgtcctgcgccaggctctgtggtgaccagtcggtttgtgggaaattgccattaaagttgtagaaactgccaatttcatccgggaagatgttggcccatgaactgaagtaacgattgttttgtttgctgtaactgccaccaaacattagattgtgctgacgaccaaacaattcataactaccgtcagcgaacaaatccagcgcatcaactttacgtttgccactgttccaaccggtgccgccgacataatcaaagccaggtccataattactgtatggcccaaccagcataccatccgctttgtttacataggcatcgacatacatcattttgctgtcaaattcgacttcagagtgggtggcattcagtgtcgcttgccaggtatcagcaaactgctgcttcagggtcataaagaccttgttgatctctttatcgttgtacgcccagtcaggtgcggtactgcgtgcgcgatcgtaactgttgctgctgccatcagtattccagcgcggtaaaccgccccaggtagggctattaacatcaatgcgctgatattcgtaaccggctgaaagcgtcgtaagatcgcctaaatcagcatcgacaatgcccgagaagaaggtcttttcactgttgtagcggtccagccatgagtcgttattctggtagccgccgacaattcgcgcgcggattttaccgtcttcggtgagtgggctttgtaaatccgccacataccgttctttgttccagctaccgtattccgccgagacatcgcctttaaattcacgactggtcgcgtgttttcgaaccatattaattgccgcagatggattacccgtcccggtcatgagtcctgtcgcgccacgcactacttctacgcgttcaaagagtgccatatcagaaagtgcgtcgcccagattccagcgcgattcaaaataggtggggataccatcaaccatatagttatcgatctggaatccgcgggaataataaagagcacgatcggaatccgcctgacttttgctgatccccagcgtgttttccatcacttcgcccagcgtttgtaactgctgatcttccatccgctgctggctaacaatagtgaccgactgaggaatatcacgttgagtcatctgcattttggtacccgcagaggtagacgttacgctgtaatcattttcgccatcatctggagctgtggctgaaccctcaacaatcaccgtttcttcagtggctggtgcagcaaaagcggcagaaggtaatagtgccagtgctatgcaaccggcaagtagtgacggtttggtgatggcttgatattgattatccctgttaaattgtgttgaaagcatttgaaatctcttggtttatgttgtcgtcaggctcatgccggaggagggtgatgagcgattatatttagtgtgcgaataattttgtttgtaaatgcaaatgagaaatatacgcattcatatttgtcatgtaaaccaaacagagaatgtcttttcagcgcattcgcaggcagaaatgggaataatggcgatatatacggcagcaaaacgattttttgcttaagaaatcgtgagttaaggttgaaagagcaggtttaactcgaccatactctatactcgcagtgtggcgcggcgtagcatggcgcaacgcatggctatttgaaaaaggaaaatgtcgtggcagaagaaactatattcagcaaaattattcgtcgtgagatcccctccgatatcgtctaccaggatgatctggtaacggcgtttcgcgatatttcgccgcaagcgccaacgcatattctgatcattccgaatatcctcattccgactgtgaacgacgtctcagctgagcatgagcaggcgctgggacgcatgatcaccgtagcggcaaaaattgctgagcaagaaggtattgccgaagatggctatcgtctgatcatgaataccaaccgccatggcggacaagaggtttaccacatccatatgcacttgttgggtggccgtccgctgggaccaatgctggcgcataaaggtctgtaacgatgagaaaaggatgctttgggctggtgtctctggtgttgttactgctggtgggctgtcgttcacatccggaaattccggtgaatgatgagcaatcgctggtgatggagtcatctttattggctgcgggcatcagtgcagaaaagcccttcctttcgacgtctgatattcaaccttcagcatcctcaacgctttataacgaaaggcaagaacccgttaccgttcattatcgtttttactggtatgacgccagagggctggagatgcatcctctggaaaggccacgcagcgttaccattcccgcacattcggcggtaacgctgtacggcagcgccaattttctgggggcgcacaaagtcagactttatctatatttgtaaggggtgaatcttgatgacaaaaatgagtcgctacgccttgattaccgcgctggcgatgtttctcgccgggtgtgtggggcaacgtgaacctgcaccggtagaagaagtgaaaccagcgccggaacaaccagccgagccacaacagcctgtccccacagtgccctcggtgccgacgatcccgcagcagccaggcccaattgagcacgaagatcaaactgcaccgcctgcgccgcatattcgccattatgactggaatggcgcaatgcagccgatggtcagtaagatgcttggggctgacggggtgactgcgggtagcgtcctgctggttgatagcgttaacaaccgtactaacggttcgctgaatgccgcagaagcgaccgaaacgctgcgaaatgcgctggctaataacgggaaatttaccctggtttccgcccagcaactgtcgatggcgaagcaacagttaggtttgtcgccgcaggacagtttaggcacccgtagtaaagccataggcattgcccgcaatgtcggcgctcattacgtgctgtactccagcgcctctggcaacgttaacgctccgaccctacaaatgcagctgatgctggtgcagacgggcgaaattatctggtcaggtaaaggtgccgtttcgcagcaataatcccatcacgcgcgacgaattgctgtcgcgctttttcccgcagtatcatcccgtcacgacgtttaatagtgggcttagtggcgggagttttctcattgaacatcagggccagcgttttgttgtgcgtcagccgcacgatcctgatgcgccgcagtccgcgttcttgcgccagtatcgggctttatcacaactacccgcatgcattgcaccgaagccgcatttatatctccgtgactggatggtagtcgactatctgcccggcgcggtaaaaacgtatttgccggataccaacgaactggcaggcttgctgtattatctacatcaacaaccacgttttggctggcgaataacgctgttgccgttactggaactgtactggcagcaaagcgatccggcgcggcggacagtgggttggctgcgaatgttaaaacgtctgcgcaaagcgcgggaaccacggcctttacgcttaagtccattgcatatggatgtccacgccggaaatttagtgcatagcgcgtcagggttaaaactcatcgactgggagtatgccggagatggtgatatcgcgctggaactggcggcggtgtgggtggaaaatactgaacagcaccggcaattggtcaatgactatgccactcgcgcgaagatttatccggcgcaattatggcgtcaggtcaggcgatggtttccctggctgctgatgctcaaagcagggtggtttgagtaccgctggcgacaaaccggcgatcaacaatttatcaggctggccgatgacacctggcggcagctattaataaaacaataaggagagcagtgtgggtccagtaatgttggatgtcgaaggttacgaactggacgcggaagagcgtgaaatactggcgcatccgctggtgggagggctgattctctttacgcgtaactatcatgatcctgcccagttacgtgaactggtgcgccagatccgcgcagcttcgcgcaatcgtctggtggtggcggttgatcaggaaggtggacgcgtgcagcgttttcgtgaaggttttacccgcttgccagcggcgcaatcattcgctgcgctgtcaggaatggaagagggtggcaaactggcgcaggaggcaggttggttgatggccagcgaaatgatcgctatggatattgatatcagctttgcgcctgtgctggatgtcgggcatatcagcgcggcgattggcgagcgttcttatcatgccgatccacaaaaagccctggcaattgccagccggtttattgatggtatgcatgaagccggaatgaaaacgaccgggaaacacttcccaggacacggtgcagtaacggcagactcacacaaagaaacaccgtgcgatccacgtccacaagcggagattcgcgctaaagatatgtcggtcttcagttccttaatccgcgaaaataaactcgacgccattatgcctgcgcatgtgatctacagtgatgttgatccgcgtccggcgagcggttctccctactggctgaaaaccgttttgcgtcaggaactgggttttgacggcgtgattttctctgacgatttatcgatggaaggtgccgcgattatgggcagttatgccgaacgcgggcaggcttcactggatgcgggttgcgatatgatcctggtctgcaataatcgtaaaggggccgtcagcgtgttagataatctgtcaccgatcaaggcagaacgtgttacacgtttgtatcataaaggttcattttcgcgacaggaactgatggactcggctcgctggaaagcgatcagcacccgtctgaatcagttacatgaacgctggcaggaagagaaagcaggtcactaaccctggcttatgtgaggaagcgatgattatctatttacacggttttgactctaacagtccgggtaaccacgagaaagtcttacaattgcagtttattgacccggatgtacgcttgataagctacagtacgcggcatccgaaacatgatatgcagcatctgcttaaagaagtggacaaaatgttgcaactgaacgttgacgagcgtccgctaatttgcggcgttggcttgggcggatactgggcggaacggattggttttctttgcgacatccgccaggtgatcttcaaccctaatttgttcccttatgagaacatggaaggcaagattgatcgcccggaagagtatgccgatattgccactaagtgtgtgaccaacttccgtgagaagaatcgcgatcgttgcctggtgattttgtcgcgtaatgatgaagcgcttaacagccagcggacatctgaagagttgcatcattattacgagattgtctgggacgaagagcagacgcacaaattcaagaatatctccccgcatttacagcgcattaaagcgttcaaaaccctcgggtaaatgccctcgtcgcatcaggtaaccttgccggtacctgatgcgctccgaattctgtgggtcggataaggcgtccacgccgcatccgacagtcgagcatcaatgcctgatgcgcttcttatcaggcctaccgaacgccctgcatacacccctcactctatatcactctcacaaattcgctcaaataataaacaataaactctgttttttgatctcacccggtaaagtcgcctatcttttcagcaacaaaacttgattaacatcaattttggtatgaccaatgcaccattcatgttattctcaatagcgaagaacattttcattgctgtaacctgttgttaattaagagctatgttaataaccattaattaacaattggttaataaatttaagggggtcacgttgactacgccattgaaaaagattgtgattgtcggcggcggtgctggtgggctggaaatggcaacacagctggggcataagctgggacgcaagaaaaaagccaaaattacgctggtcgatcgtaaccacagccacctgtggaaaccgctgctgcacgaagtggcgactggctcgcttgatgaaggcgtcgatgcgttgagctatctggcccatgcgcgcaatcatggtttccagttccagctgggttccgtcattgatattgatcgtgaagcgaaaacaatcactattgcagaactgcgcgacgagaaaggtgaactgctggttccggaacgtaaaatcgcctatgacaccctggtaatggcgctgggtagcacctctaacgatttcaatacgccaggtgtcaaagagaactgcattttcctcgataacccgcaccaggcgcgtcgcttccaccaggagatgctgaatttgttcctgaaatactccgccaacctgggcgcgaatggcaaagtgaacattgcgattgtcggcggcggcgcgacgggtgtagaactctccgctgaattgcacaacgcggtcaagcaactgcacagctacggttacaaaggcctgaccaacgaagccctgaacgtaacgctggtagaagcgggagaacgtattttgcctgcgttaccgccacgtatctctgctgcggcccacaacgagctaacgaaacttggcgttcgcgtgctgacgcaaaccatggtcaccagtgctgatgaaggcggcctgcacactaaagatggcgaatatattgaggctgatctgatggtatgggcagccgggatcaaagcgccagacttcctgaaagatatcggtggtcttgaaactaaccgtatcaaccagctggtggtggaaccgacgctgcaaaccacccgcgatccagacatttacgctattggcgactgcgcgtcatgcccgcgtccggaagggggctttgttccgccgcgtgctcaggctgcacaccagatggcgacttgcgcaatgaacaacattctggcgcagatgaacggtaagccgctgaaaaattatcagtataaagatcatggttcgctggtatcgctgtcgaacttctccaccgtcggtagcctgatgggtaacctgacgcgcggctcaatgatgattgaaggacgaattgcgcgctttgtatatatctcgctataccgaatgcatcagattgcgctgcatggttactttaaaaccggattaatgatgctggtggggagtattaaccgcgttatccgtccgcgtttgaagttgcattaatcgacgtacactggcggatgtggcataaacgcctcatccgcccttgaggaacagcgcgatcggcagccgcgttgtatcaggcatcctttcagactcctccgaatccttaagtatttccagccattcccgcgcttttcatcttctgtctgatagctgcttttctccttcgcttgcatgattggcataactgcaaagaaggaggtgttcccgtgaataaatcaatgttggcgggtatcgggattggtgtcgcagctgcgctgggcgtagcggcagtggccagtctgaacgtgtttgaacggggcccgcaatacgctcaggttgtttctgcaaccccaatcaaggaaacggttaaaacaccgcgtcaggagtgtcgcaacgtcacagtgacccatcgtcgaccggtgcaggatgaaaatcgcattaccgggtcggtgctcggcgctgttgctggcggcgtgatagggcatcagtttggtggtggtcgcggtaaagatgtcgccactgttgtgggggcgctgggtggtggatatgccggtaaccagatccagggctctctccaggaaagcgatacttacacgactacgcaacagcgttgtaaaacggtgtatgacaagtcagaaaaaatgctcggttatgatgtgacctataagattggcgatcagcagggcaaaatccgcatggaccgcgatccgggtacgcagatcccgctagatagcaacgggcaactgattttgaataacaaagtataacaaggctgtactctgcaatttggcccctcattcgctcaggctgaggggctttttttgcgacttatttcaccagttcgggccataaacgcaaagtcgttccggcaatctgcatcagtttttccagcgatgcaccttcgcgtgcgctgatcgacatcccctgaataatacaattaaggaattctgccagatgtgtcacgtcacagtggggcgggatttccccgcgcgcttgtcgttgacataaaaactgctgcaaagtgcgctcttgcatcgcatggcgtgatttcaacgtattggcgatatctcctgaatctggggagagggtggtgcagttgttgatcatgaagcagcctgccggggtgtctttgctggtaaagcagttggcgatggcagcaaaatagtcagccagcgcagactccacgcttttctcttcacaaaacagctgtgcttcatgcttagcggcaaaacgatcgatatagcggtcgagaacggcacgaaataacccctctttgttggtaaattccgcgtatagcgtgggcgctttggctccggtcgcttcgacgaggtccgcaagagaagtcgcttcataaccgtgttgccagaacaatttcatggccttatcaagcgcggcatccctgtcgaacacttttgggcggccacggcttttttttacacattgtgttgagtcagttgccatgatgccgttgtacctggtgactgtgaatgaaaggttattataaaaataatcacctccgttcaccagtccagatcccataaaaataattgctttctatttaactgaaatttaaagatttttaaattaattaatgattgttataaaaaatatcttgtatgtgatccagatcacatctatcatttagttatcgatcgttaagtaattgcttgcgacgtcattcatctgcataaggccactattatgaaaaacgtaaaaaccctcatcgctgcggcgattttaagctccatgtcatttgccagctttgcggctgtcgaagttcagtcaacgccagaaggccaacaaaaagtcggtacaatcagtgctaacgcggggacaaatctgggatcgctggaagagcagctggcgcaaaaagcggatgagatgggcgcaaaatctttccgtattacttctgtaaccggtccgaataccctccatggaacagcagtaatttataaataagcattaaccctcattaatgcctgctactgctgattttttccccgcgacatgccgtgtcgcggggatttttttatccgggctttacagcgtttgtgggctcacttgatgacggcggacatccaccggcatcccggaacggacatccatcacatgttgcatcacttcagcgtcagtttgtgctgcatctttaaatgattgcattgcgctattcagcgtaattggcagcagctgcggatcgtcatcaatcttctctgacagcggctgatgtacttcaaccagacgcgcaccgtttggttcggcagagacttttatcggagtgttgatgatattcactttggtgcctggggtgacctggctaaagagtgttttgatatcgtcatcccgcagacgaatacagccagaacttacccgcatgccaatgccgaaatcggcgttcgtaccatgaagcaaataaacgccgccataggccgccagacgaatcgcatgatggcccattgggttatccggtccagccggcactaccgcaggcaactcaattccctgtgctttataacgggcgcggatgtttgccgttggcgtccaggttgggtttgcacgtttgtctgaaacggtggtcaccattgtcggtgtcagcgtgtcaccacctaactgaccaatacctattggatacacggttaccgaatttttacccggcgggtagtaatagagacgcagctccgcaatgttgatcacaatgccttcgcgcggcgcatctggaagtagggtttgcaacgggatcgttaacacgctgcccgcgcgcggtacgtaaggatcaacgccggggttagcctgtaacagagcgagaaagccgacgttgtattttttggcgatggcttccagagaaccaccgtcattttccaccacatgaaatttgttttcgccaaccagacgactgcccgctggcggcagcggccaggtgttggcttttgccggtagcgccagcgccacggcagcggcgaacgtaaaaaacgttagccagcgagaaaaacgcgttttgatcatcaccaaaaatccataataaatataaggttattgtaataaacagataagcctgaattatggatggtgacagtgtcggatagtgcagggaagtgcaaagaatttgtaaatgttgcagatgggggcgcagaaacgcccccgatttaccattaagcgatcgcgttctcttccagttcacgcataaactggcgtacccattcgatacgcgttttccgctcactcaaatcctgaataaatttcaggcgcgtcggaccatcaaggcggtaatgctgcggctgtttttgcagcaaaccaatcaaccaggccggattaacgtgattcttctcggcaaattcgatcaccccgcctttctcattaccttccagcttcctgatccccagtttctgcgcttgctggcgcagacgggcaatatccagcagggtacgcgccggatctggcagcaggccgaagcgatcgataagctcgactttgatctcttccagttcgttttccgttttggcgctggcaatacgtttgtagaacgacagacgcgtgttcacgtcagggatgaaatcatctggcaatagcgacggcatccgcagctcgacttctgtttgctggctggtgagatcttccagcgacggctcgcgtccggctttcagtgcatcgacggcgttttccagcaactccatatacagcgagaaaccgatggtttccattgagccgctttgttcttcgccaagcagttcacccgcgccgcgaatctccagatcgtgcgttgccagcgcaaaacctgccccgagatcttccagcgaggcaattgcttcaagacgtttttgtgcatcggtagtcatcgcttttggatgcggtgtcagcaaccatgcatatgcctgatgatgcgaacgtccgacgcgaccgcgtaactggtgcagctgcgccagaccgaagtgatccgcgcgttcaatgataatagtgttggctgtcgggatgtcgatcccggtttcgataatggttgtacaaaccagcacgttgaaacgttgatgatggaaatcattcatcacccgttccagttcgcgctcgcgcatctgcccgtgaccgatggcgatccgcgcttctggcaccagttctgccagccgttcggcggctttctgaatgttttccacatcattgtagagataataaacctgtcctccgcgcaaaatttcacgcaggatcgcctcccggaccaccatgctgtcatactcacggacaaaggttttaactgccagacgacgggcgggcggcgtggcgataatcgacaggtcacgcattccgctcattgccatattcagcgtacgtgggatcggcgttgcagtaagcgtcagaatatccacgttcgcgcgcatcgctttaatgcgctctttatgacgcaccccgaagcggtgttcttcatcgacaatcagcaggcctaaatctttaaacttgacgtcactttgcagcagtttgtgcgtaccgatcagaatatcgattttcccttccgccacttccgcaaggatttgcgtctgctctttggcgctgcggaaacgggagatcatttcgatacgtaccggccagttggcgaaacggtcgcggaagttgtcgtaatgctgctgcgcgagaagggtggtaggcaccagcaccgccacctgcttgtggttatctactgccaggaaagctgcgcgcatcgccacttctgttttaccaaagccaacatcgccgcacaccagacgatccattgccagcggctgacacatgtcgctaagtaccgcattaatggcctgcgcctgatccggcgtggtttcaaacgggaagctgtcgcagaacaactgatactgctcacgatcgtgtttaaacgcgaagccctctttggcggcgcgttgcgcgtagatatccagcaattccgccgccacatcacgcactttttccgccgctttctgccgcgcgcgtgaccacgcatcgccgccaagtttatgcagcggggcgttttcttccgcgccacctgcgtaacggctaatcagatgcagtgacgacaccggaacatacagtttggcgtcgttggcataggtgagcatcagatactcgccagtaatgccacccgcttccagcgtggtcattccggcataacggccgacgccgtgctccagatggaccaccggctgaccaatatgcagttccgcaaggttacggatcagtgtatcggggttgatggtgcggcgagaatcctgacgacgacgggcaacgcgttcaccgagcagatcgctttcgcaaatcagcgccagattacgcaccgtatcgacaaaaccatgttcggcagcgccaatcatcagataacgcccacggtcgctggcttcatcaagacgcataatgcgttgcggagcaattttaattcgtgcgagcagttcacccagcgcttcacggcgaccttcactttctaccgagaacaccaccggaccgtcgaaagtctcgaggaacttacgcagcgcatccagcggcgctttttgttgtgcctgaacggccaggtctggcagtttctggaaacctaaattggcattcgcggcttttgtcggtaaatgttcagtttttagctgcacccggggccagtttttcagctctgagaagagctcgtccacccgcagccagagcgattgtggtggcaacagcgggcgcatcggatcgacgccgcgattctcaaaacgcgccagcgtgtcagcctggaaacgttcggcactggtttccagatcgccagtattcacgagcaaggtattggcagggaaataactgaacagcggcggcagtggttcgctgaagaacaatggctgccagtactcgatcccggcaggtaatgtgcctttactcacttgctggtaaatatgttctggatcgcgcttcacttcgaaggtatcgcgccactggctgcggaacagttcaattgccgctttatcggtcggaaattcgtgcgcgggcagcagattgatcgcttctacttcctccagcgtgcgctggctgtcgacgtcaaacacccgcaggctgtcgatttcatcatcaaagaaatcaagacgataaggcagctcactccccatcgggaagagatccagcaacgcgccgcgcgtggcgtattcgccgtgctccatcacctggtcaacatggcgataaccggcgctgtccagttgggttcgtaatgcatctcgtgacaggcgctgaccttttttcatcaccagcgcatgaccgtggagaaaactgtgtgggcaaacgcgctgcataagcgtattcaccggaacaatcagtacgccacgctgcatcgtcggtagctggtaaagggtggaaaggcgcgaggagataatgtcctgatgaggcgaaaaactgtcgtagggaagagtttcccagtccgccagattcatcaccatttgatcggtaaactggctgatttcatcatgcaaacgcagagcattttgcatatctggtgcaatgagtaccaccggaccggcgtgacgttcggcaatttccgctaccagcgttgcacaggctgcgccggttaactcgcccagcagacgctgctcacccgctttgacgggcagcgtataacgatattgttcaggcataacggttgtcagattctcgttaggatatgcctcaacatatgggggcatatctctgataagcaatgctgttcattatccgtaatcgacatggtttagcaaattgaatcgccccggctggggcgatggcttagcgggagtaactgacggcagcgggcagtgaaggcggggagaacaacagatcgctgaatgcacgctgtgaaagttttcttaccagcaagcccgcaacagtacagatgaacaaactgacaaagggataaaccagcaggagtgtcagttcgacttgcggcgaccagcgtgctgcgttcatttgcgcaagcagagttaagctgaatatttcaaccagaatgcgatgggtggtgtagatagcaatggtgttggagccaatcacattcagcaggctggtggagcgcataccgaatcgttgctcgtattgataaaacagcttcatgatcaccacaatcgataccagcgacaacagcagcgagatagtaaacaaccaggcaccgaccgccagaacggtaagcaaagaagccatcagcagatggcggcgcaacggcacctctttaacacaggtcattattgttgcgccaaaccatgcgccaaggctgtaataaggcaaattgcggatcacactgttcattccccaccacggcgtgggaacgaaattaaccgccacactcagcagtacaaacaaggcgaatagtggcagcgccagacggctaaaaattttacataccacgaaatagacaattaacgcatacagataccacaagctggtgctggcggtgatcatcccgtgcaggaactcaccggtggaatcggcataagcggcattggaggcattgcttaaatcgcgctcaggtgccagccactggttcagcgcacttaacgccagccactgcaccacgccccaaagcgccagcacccagaagatgttccagatccgtttatcgagacaatttccccacggtacgctgtcgatatagcggcgaatcaaatagccggatataaagaaaaaaaccggcatacgaaagggggcaaggtaaagattgaaatagatccagcatttgctcaggacttccgataacggatgctgaaaagtggtcagatgcggataaaaggtaatgaccgagtgataaatcaccaccagacaaatacataaccctttgatctggttaatccatagctctttttgtttcatcaggacaacacgctcttttttaatttacatgcggttgatcctgcgggttatgacccgaggtgtaatgggtatctgtctgtattggatgatttttcagattaagatcaggcggcaagattgatgataaaacatggcaatttagccgattgatttacgggggcttttcagattagccctgacgatcacttacagttcagacgtttacccatcttgctttcgcttatatactcgtgtctttgctacagcaaccagacggatttcatgtaccaacctgtcgctctatttattggcctgcgttacatgcgtgggcgtgcagcggatcgcttcggtcgtttcgtctcctggctttctaccatcggcattaccctcggggtgatggcgctggtcacagtattgtcagtgatgaacggctttgagcgcgagctgcaaaacaacatccttggcctgatgccacaggcaattctctcttctgagcatggctctcttaacccgcagcaactcccagaaacggcagtcaaactggacggcgttaatcgcgtcgcacctattactaccggtgatgtggtactgcaaagcgcgcgcagcgtggcggtcggggtgatgctcggtatcgacccggcgcaaaaagatccacttacaccgtatctggtcaatgtgaaacaaactgacctcgagccggggaaatataatgtcatcctcggcgaacaacttgcctcacagctaggcgttaatcgcggtgatcaaatccgcgtgatggtaccatctgccagccagttcacgccgatggggcgtattccaagccagcgcctgttcaatgtgattggcactttcgccgccaacagtgaagtcgatggctatgaaatgctggtgaatattgaggatgcctcgcgtctgatgcgttatccggcaggcaatattaccggctggcgtttgtggctggatgagccgctgaaagtcgactcattaagtcagcaaaaactgcctgaaggcagcaaatggcaggactggcgtgatcgtaaaggcgagttgttccaggccgtacgcatggaaaaaaatatgatgggtttactgctgagcctgattgtcgccgttgcggcgtttaacattattacctcactagggctgatggtaatggagaagcagggcgaagtagcgatcctgcaaacgcaaggcttaactccgcgacaaatcatgatggtctttatggtgcaaggggccagcgccgggattatcggtgcgatcctcggagcggcgcttggcgccctgcttgccagccagttaaataatctgatgccgataatcggcgtcctgcttgatggcgcggcgctgccggtggctatcgaacctttacaggtcattgttattgcgctggtggcgatggctatcgcgctgctgtctacgctttacccttcatggcgcgctgccgccactcaacccgctgaggctttacgttatgaataagatcctgttgcaatgcgacaacctgtgcaaacgctatcaggaaggcagtgtgcaaaccgatgtgctgcacaatgtcagtttcagcgtcggcgaaggtgaaatgatggcgatcgtcggtagctctggttccggtaaaagtaccttgctgcacctgctgggcgggctggatacgccaacctccggcgatgtgatttttaatggtcagccaatgagcaaactgtcgtcggcagcgaaagctgaactgcgcaaccagaagctgggctttatttatcagtttcaccacctgctgccggattttaccgccctggaaaacgtggctatgccgctgctgattggcaagaaaaagcccgctgaaatcaacagccgtgcacttgagatgttaaaagcggtggggctggatcatcgtgcgaatcaccgcccatctgaactttctggcggcgaacgccagcgtgtggcgattgcccgtgcgctggtgaataacccgcgcctggtactggcggatgaacctaccggtaacctcgatgcgcgtaacgccgacagcatcttccagttgcttggggaattgaatcgcttgcagggcaccgccttcctggtggttactcacgacctgcaactggcgaaacgtatgagccgccagttagaaatgcgtgatggtcgtctgacggcggaactgagcctgatgggggcggagtaatggcgatgcctttatcgttattaattggcctgcgttttagtcgcggacggcggcgcggcggcatggtgtcgctgatctccgttatttctaccattggcattgccctcggcgtggcggtattgatcgtcggcttaagcgcgatgaacggctttgaacgcgaactgaacaaccgtattctggcggtggtgccgcatggtgaaatcgaggcggtggatcagccgtggactaactggcaggaagcactggatcacgtgcaaaaagtgccgggtattgccgctgccgcgccgtatatcaatttcaccgggctggtggaaagtggcgcgaatcttcgcgcaatccaggtgaagggcgttaacccgcaacaggaacagcgtctgagcgcattaccctcgtttgtccagggcgatgcgtggcgcaattttaaagcgggcgaacagcaaattatcatcggcaaaggcgtggcggatgcgctgaaagtgaagcagggggattgggtgtcgattatgatccccaactcgaatcccgagcataaactgatgcagccaaaacgtgtgcgtttgcacgttgccggtattttgcagttgagtggtcaactcgatcacagttttgccatgatcccgctggcggatgcccaacaatatcttgatatgggttccagcgtgtcaggtattgcccttaaaatgacggatgttttcaacgccaataagctggtacgcgatgcgggtgaagtgaccaacagctatgtttatattaaaagctggattggtacttacggctatatgtatcgcgatatccaaatgatccgcgccattatgtatctggcgatggtactggtgattggcgtggcctgtttcaacatcgtctccaccttagtgatggcggtgaaagacaagagtggcgatatcgcagtattaagaacgctgggggcgaaagatggtttaattcgcgccatctttgtctggtatggattgctggcagggctgttcggcagcctgtgtggtgtgattatcggcgtagtggtttcactgcaacttaccccgattattgagtggattgaaaagttgatcggtcatcagttcctctccagcgatatctattttattgatttcctgccatcggaattgcactggctggacgtcttctacgtactggtcacagcattgttgctgagtcttttggcaagttggtatccggcgcggcgcgccagtaatattgaccctgcgcgagtccttagcggccagtaaaggcagtacattaaaacaaggagcggcaatgtattacgggtttgatattggtggaacaaaaattgcgcttggcgtgtttgatagcggtcggcagttgcagtgggaaaagcgggtgccgacaccgcgtgacagctatgacgcatttttagatgcagtgtgtgagctggtagctgaagctgaccaacgttttggctgtaaaggttctgtcggcatcggtattccgggaatgccggaaacagaagatggtacgctgtatgccgccaatgtccccgctgccagcggtaaaccgctgcgtgccgacctgagcgcacgtcttgatcgcgatgtacgccttgataacgatgccaactgttttgccctttcagaagcctgggatgatgaatttactcaatatccactggtgatggggttgattctcggcaccggtgttggcggcgggctgattttcaacggcaaaccgattaccggtaaaagctacattaccggcgagtttggccatatgcgtctgccggttgatgcgttaaccatgatggggttggatttcccgttacgccgctgcggctgtggtcagcatggctgcattgaaaattatctgtctggtcgcggttttgcgtggctgtatcaacactattatcatcaaccgttgcaggctcccgaaattattgcgctttatgatcaaggcgatgagcaggcaagggcgcacgttgagcgttatctggatttattagcggtttgtctgggaaatatcctgaccatcgttgaccctgacctggtcgtcattggtggtggcttatcgaatttcccggcaatcacaacgcaactggcggacaggctgcctcgtcatctcttacctgtagctcgtgttccgcgcattgaacgcgcgcgccacggtgatgcgggaggaatgcgtggtgcggccttcctacatctaaccgattaaacaacagaggttgctatgctgtcgcgtcggggtcatcggttaagtcgttttcgtaaaaataaacgccgcctgcgcgagcgtttgcgtcagcgtatttttttcagagataaagtggtgccggaagcaatggaaaaaccaagagtactcgtactgacaggggcaggaatttctgcggaatcaggtattcgtacctttcgcgccgcagatggcctgtgggaagaacatcgggttgaagatgtggcaacgccggaaggtttcgatcgcgatcctgaactggtgcaagcgttttataacgcccgtcgtcgacagctgcagcagccagaaattcagcctaacgccgcgcatcttgcgctggctaaactgcaagacgccctcggcgatcgctttttgctggtgacgcagaatatcgacaacctgcatgaacgcgcaggtaataccaatgtgattcatatgcatggggaactgctgaaagtgcgttgttcacaaagtggtcaggttctcgactggacaggagacgttaccccagaagataaatgccattgttgccagtttccggcacccttgcgcccgcacgtagtgtggtttggcgaaatgccactcggcatggatgaaatttatatggcgttgtcgatggccgatattttcattgccattggcacatccgggcatgtttatccggcggctgggtttgttcacgaagcgaaactgcatggcgcgcacaccgtggaactgaatcttgaaccgagtcaggttggtaatgaatttgccgagaaatattacggcccggcaagccaggtggtgcctgagtttgttgaaaagttgctgaagggattaaaagcgggaagcattgcctgatgcactacgcttatcaggcctgcaaggggacgcaattaattgaatttgcgggttttgtgggccggataaggcgttcgcgccccatccggcataatacacgcgcacttttccggcctcttttatcgtttactcgtcaataacaatgcggcaataaacgtacagacaccaattagccctgcccagagtggcgatattctggtaatcgcaaagctattatcgatatacaaacataaagcctgataacccatattggcaatagtcatcgccactgcaaattttaacgcataaataaaacgagtcgtgtagtaaaagatcctggaaaataagataaacgtcgcagcccaggcgataaaacctaatgtgttggtgctgccggggggagcattttcatgctgttgtcctggatgcggataatacgttagtggcggcgtcgattgttttaatatctgtgcttgtagaacagccaatgcattattgattccctgataccagagatctgcatttaaataagccagcgtgtgattttctatcagaaggccgagatgtttatcgtccagaccactttcaacctggccgttggtgatcataattaaccgtggttcgcgggtagtaaatagtaacagaacacttccttttacatcactcaatgaagatgacgcatgcgccagcatcgctttaccattttgtctgagactggcttcattattaatgtcgggtaaaaccacaataaacggtgcaattcccgtttgttggcgaaaaagctcggctttatgcgcgatctcttcagcatctggtacagtaccggtaacgtccgtaaaaagtgtcttcattattggaattaatggcttgctggctgctgtcagaggcaggagtatcagtaaactgagcagtataatgaattttttcatgggcgggacttccgtttcctgcgtgattttttagaggagggcatacttattaataaaccgacggcgataaaaataacgcccataatgccgataaacccccatttaaaaaaattaacccacgggttatttatctcagccttttcaggatgcccgggagaataataaacattaactttatcgccttcgctgtcttcataaaaatcgctgccgatactcgaattgaaaattagcgtgtaatctggcgtcggtcgaaaggcaacgacgggataccacgaaccatctttacccgtgcgatgagaatgactggagtgccagacggtatcaacaatgacgccttcggtatgaatcgcgtctttgctataggtgaactggttataaaagacaacaacagaaatgaggatcagtaccagaccgataccgaggaatatacgaaagaaaactttactgtcctgactcattagccacatccttgctaactaaaaaacgggcggtaataccaccgcccgcttgctgaattaacgtcctgctttcagcttctgataatactcttcataaatgctgctggctgcgccaacgtcattctgccattcgccatttttaatggtttcagcatccgggtagagtgttttatcgttcgccacttctggacttaacagcttacgcgccgcaaggtttggcgttggataaccgatagtttcagcaacctgttttgccacatccgggcgcagcaggaagttgatcaatttcagcgcgccttctttgtttttggcatttgccgggatcgccaggctgtccatccagaaaatgccgccttctttcggccacaccacgtcaattggcgtacccgcctggcgtgcaacgaaagcagaaccgttccagatcatgccgaggttaacttcgccttccatgtacgggttcgccgggttatcggagttaaaggctgccacgtttggcatcagttttttcagctcgttatatgcagcttcaatctctttcggatcggtggtgttaccggagtagcccagcttacgcagcgccatctggaacacttcacgggcatcgtcggtcaacagcaggctgcctttgtactctggcttccacagatcggcccagctggtgacagatttcggatccaccgcatcaccgttaacaccaatcgccgtcgcaccccagatatacggaatggagtagtcgttattcgggtcaaaaggcttgttgagcatgtctggatcgagattgctgaagtttgttaacttcgacttgtcgatcttctggatcatcccttctttacgcattttatcaacgtaataggttgaaggaaccaccagatcataggcaccgtctttgtatgttttcagcttggcgtacatggtttcgttcgactcgtaagtcgaatagataaccttaataccggtttctttggtgaactgttcaagcagtcctggcggcacgtactcggtccagttgtagaaatacagcgtgttgttgtcatcggcgtgagcggcgctcatgcccagtgccagagcacccgccgcgagcaggtggcgtgaccattttttcatttaacgtcccctgtgttacctttcgttttatcacgagcaataagctggctggcaataaccatcaccagcgacagcaccagtaatatggttgccagcgcgttaacttccggcgatacgccgactttgaccatcgaataaatttttaacggcagaatttcataacttggtccggtgacgaacgaagaaactaccacatcgtccatcgacagggtaaagcttaacacccagcccgccgccaccgctggcattgccagtggcagaatgatttttcgcagaatggtaaattcgctggcaccgagatctttcgccgcttccagcattcgcacgtcaaaacctttcaggcgcgaatacaccgtcaccaccacaaatggcaggcagaaggtgatatgcgagaacagcagcgaccagaagccaagctgaatacccagcagcataaacagcaccagcagcgaaatcgccatcacgatatctggtgacatcatcaccacaaacagcattccgctaacgaacggcttaccacgaaagcgataacggtacagcgcaactgccgtcagtgaaccgataagcgtagcaaacgtcgccgaaaacaccgccattgttagtgaatgctgcgctgcctgtaacaggctgtcgttgttcatcagcaggctataccatttggtggtaaaaccctgccagttgatgccaaagcgcgagctgttaaaggagttcacaatcaaaataatgattgggatatacaggtacgcgtagatagcggtcataaaaccgccgcgaagcagtcgaccgatcattcgagttccaccttcttattcagcaaacgagaagcgcgccagtaaaccagcaacatcaggcccattacgatagtcagcgtaatgctggtagctgcaccaaacggccagtcacgaatattaaggaactggaccttgatgacgttaccgatcagcaggtttttcgcaccgcccatcaggtcggatacatagaacaggcccatcgctggcagcatcaccagcagacatccggcaataattcccggcatcgtcagtggaataatgatacggataaaagtctgtaacttgctggcaccgagatcgcgcgccgcctcaagcaacggcttatccagtttttcgatactggagtacagcggcatcaccataaacggcagcagaatgtaaaccagaccgataatcaccgcactgggcgtgaacatgatacggattggtgtgtcgataacgcccagccagagcaaaaactcgttgagatagcctttggtgctgaggaaaattttcagcccgtagatacgaattaatgagttggtccagaacggaacaatcagcagaaacagcagcagcggacgcaccttgtgtggcaacttcgccagaaaccaggcaaacgggtagcccagcaccaggcaggcgagggtggcgatcagcgccatattcagcgagtgcaatagcacttcaaaatagagcggatcgagcagacgcgtgtagttatccagcgtaaagaccattttgacaaaactggcgtcgtcgcgggtcaaaaagctggtgccaatgatcatcaggttgggcagaaagacaaacaacacaagccaaccgacaatagtgacaatcactacattctggaacttacttgtgttcttcatcagccagtacgacctcccagctttctacccaattaatggccattttttggtcgagagagtggtcaaagtcaggatcgtcttcattgaagaattcgctgaccatcaccatcttgccattttccagttcaacaaccgactccagcgtcatgcctttgtagttacgctcgcgaacgtaaccaatcagcccttcagcgtggttgtcgtcgttaatctcttcaacacgtaagtcttccgggcgcagcagaacatgcagtttttgccccggttcaacggcgaagttaacgtagatattacattcgcggccttcaacgttggcgcgtacgcgctgctcgtctagacgttcgatgacagtggcgttaaacatattgatttcgccaatgaagccggcaacaaacaggtttttcggctcttcgtagatttcacgcggcgtgccgtcttgctcaatgcgaccatcgcgcatcaccacaatcctgtctgacatggtgagtgcttcttcctggtcgtgagtcacaaagacgaatgtaatgccaagcttacgctgtaacgctttcagctcgttctgcatttgcttacgcagtttgtaatccagcgctgagagcgactcatccagcaacaacagacgaggcttgttaaccaccgcgcgagcaatggcgacgcgttgctgttgaccaccagagagctgatgcggtttgcgttgagcgaaggtttccaactgcaccatccgcagggcttccatcacgcggggcgtaatttcagcagcgggggttttttgcatgcgcaacccaaaggccacattttcgaacacggtcatgtgggggaaaagtgcgtagctttggaaaacagtgttcacatagcggttttccgccggaacgtgggtgatgtcctcgttatccagcatgatgcgtccggaatcaacagtttccagacctgcaatcaggcgaagaacggttgttttaccgcagccagaagggccaagcagcgtgaggaactcgccattgttgatagtcagatccagctggggaatgacctctttaccatcaaagcatttgcgaattcccgccaattgcaccagcggtgaaagcgaactcggttgtttattcaattttttactctgtcccatgtaaacgcaacggatggcttaccgatgcggggtttgtggttaaccaccttggtgactcttaatgagggcggtaattctacggcaaaccgcttgaatcgccaatctttgttgtgaattactggcttagctttatattcattaaggtaatgctgataaatattcccgcttgcaggggtaaaagtgacctgacgcaatatttgtcttttcttgcttcttaataatgttgtcacaaaaagtgagggtgactacatggataaactacttgagcgatttttgaactacgtgtctctggatacccaatcaaaagcaggggtgagacaggttcccagcacggaaggccaatggaagttattgcatctgctgaaagagcagctcgaagagatggggcttatcaatgtgaccttaagtgagaagggcactttgatggcgacgttaccggctaacgtccctggcgatatcccggcgattggctttatttctcatgtggatacctcaccggattgcagcggcaaaaatgtgaatccgcaaattgttgaaaactatcgcggtggcgatattgcgctgggtatcggcgatgaagttttatcaccggttatgttcccggtgctgcatcagctactgggtcagacgctgattaccaccgatggtaaaaccttgttaggtgccgatgacaaagcaggtattgcagaaatcatgaccgcgctggcggtattgcaacagaaaaaaattccgcatggtgatattcgcgtcgcctttaccccggatgaagaagtgggcaaaggggcgaaacattttgatgttgacgccttcgatgcccgctgggcttacactgttgatggtggtggcgtaggcgaactggagtttgaaaacttcaacgccgcgtcggtcaatatcaaaattgtcggtaacaatgttcatccgggcacggcgaaaggagtgatggtaaatgcgctgtcgctggcggcacgtattcatgcggaagttccggcggatgaaagcccggaaatgacagaaggctatgaaggtttctatcatctggcgagcatgaaaggcaccgttgaacgggccgatatgcactacatcatccgtgatttcgaccgtaaacagtttgaagcgcgtaaacgtaaaatgatggagatcgccaaaaaagtgggcaaagggttacatcctgattgctacattgaactggtgattgaagacagttactacaatatgcgcgagaaagtggttgagcatccgcatattctcgatatcgcccagcaggcgatgcgcgattgcgatattgaaccggaactgaaaccgatccgcggtggtaccgacggcgcgcagttgtcgtttatgggattaccgtgcccgaacctgttcactggcggttacaactatcatggtaagcatgagtttgtgactctggaaggtatggaaaaagcggtgcaggtgatcgtccgtattgccgagttaacggcgcaacggaagtaagcgaaaagggatgcggcatgtgatgccgcatccggcttaaatccaaacttacccttcgaagaaccaatacccgctattgaccagcgccgcgagcatcgcgaggaatgacggatcttccagcgcatcgccaaaattctccgcagtcagcgcaatgttgctggcgagtgcatccagtgccggacggtgcggggaatcgatcttctcaccattggcatacacgtcgtcgccaatgcgcaatacgcgcagaccacccaggcgcaccagcacttcaccttgtttcagcgcatcgtagatttcatccggctgataaggcggctctggcggcgcgatatccagttcatgacgtgactgggatataaactcgccaaaccattgcttaaagtgttccggctggttgatcaattcgagcatcatctcacgcagtttatccatctcttgcggcagaacatccgcaggatgagcgcgaggtggaacatccggatcgctgtagtagttgccgcccagttcacgttgcagcacataatcggcaaatccactaatcagttcccgcgtatttggcgcgcgaaagcccacggaatagttcatcgcattttccagcgcgtagccttcatgcgggaatcctggcggaatataaagaatatcaccaggctccagctcttcatcgatgatggcttcgaacggatcgacctgtaacagatccggatgtgggcagtgctgtttcatttgcagcttttcgcccactcgccagcgacgacgtccggtaccctgaatgataaacacgtcgtactgatcgagatgcgggccgacgccgccgccgggtacagaaaaagaaatcatcagatcatcaatacgccagtccggtagttcacggaacggtcgcatcagcgcggcggtcggctcatgccagtggttcactgcctgtaccagtaatgaccagttggtttcaccgagatgatcgtagctttcgaacgggccgtggctgacctgccatttgccatcctggtgactgaccagtcgactgtcaacttcgctttccatcgccagacccgccaactcgtctggagagatcgggtcaataaaattattaaagccgcgttttaacaccaccgggcgtttctgccagtgacgttcaagaaaatcgggccagttaagagtgagttggtattccatgttaagcatccacaggctggtatctgcaaccgattataacggatgcttaacgtaatgcgtgaagtatgggcatatttattcatctttcggcgcagaatgctggcgaccaaaaatcacctccatccgcgcaccgcccagcatgctctctccggcgacgattttaccctcatattgctcggtgatttcgcgggctaccgccagccctacaccttgcccagggcgtaaagtatcaacccgttgaccacggtcgaaaatgacctctcgcttgcttaatggaataccggggccatcatcctcgaccacaatatagagatgctcgtcggtttgccttgcagaaatttcgacaaactcgaggcaatatttacaggcattatccagcacgttgcccatcacctcgacaaaatcgttctgctcaccgacaaagctgatctctggcgaaatatcgagagagatattgacccctttgcgttgatacactttgttcagcgctgaggtgagattgtccagcagtggggcgaccggatgcagctcgcggctgagcaatgtcccgccgcgcatactggcacgatgcaggtagtagccaatttgctgtgaaatgcggctgatttgctccagcattaccggctcagcatcactgacgctcatcttttcactacgcagagaacgcagcgtactttgcagcaccgccagtggcgttttcagactatgggtcaggtcggtgagcgtcgtacggtatttgtcgtaacgttcgcgttcactttttaacaatcggttcaggtttcgtaccagactggtcagttctcgcgttgtggctggattgagcaattcgcggttatgttcttccagttcgcggacttcttttgccagggcttcgatggggcgtaaactccaccaggcggcgacccacagcagcgggatcactaacagcagattggctgagagcacatagataaaccagctccagaccatataggaactttttagctccaccggaatggtatccaccaccacaatggttaattttggcatccgcgatgttgccgggtagacgtttactgccaccgagtgggtcatctccgcgtcgtcatcatcttcccgcacttcctgcaactgttgctgtatcgaatgatctccactcagcaagaggctggtatcgttaacatccgcttcaatttcatgaaaaccattcgatttcagccagtcaggctggatcatcttcatcagccagggcacgtcacgttgcgcccataaaagctgcccgttctcatcataaattagcgtcatggtggggctttgcttgtcgatattttcgggtaactcgacatgcaacttattgttttcccacttcgcaagggtatagaacagattgctctcgccacgtaacagccgaaacgtagttttatcgaaactgacgctataaccgatcagcgcgaccattccgtaggcaagcgaaagcaccagtactaccgctgccgttgccaacagaaaacgtacccgcagcgagagcgggaaaaaaagacgcagtaattttttcatcagcgcaattcgaacagatagccctggccgcgaacggtggtaatcacttcttggggatattgtgcctgaatttttttgcgcagacgtcccatcagtacatcaatggtatggctttcccgcagctccgcatccggatagagttggagcattaacgaatctttgctgaccactttgccattattgcgtatcaacgtttccataatggtgtattcgaacgcggtcagtttgatcacttcgtcattaatagataattcacggcgagagagatcaacctgaaacggggggagcgaaatgacctgtgaagccagaccgctattacgccgcattaatgcctgcattcgcgccatcacctcttcaatatgaaacggtttagtcacataatcatcagcaccggcacttaatacttcgactttgtcctgccagctttcacgggcggttaataccagaatcggcagtgaaacatcgttgctacgccagcggcgaatcagtgacagaccgtcctcgtctggcaatccgagatcgacaatcgcaatatccggtatatgttcattgagataataatcggcttctttggcatcttctgcgtcatcgacctgatgaccagcatcctgaatctgaactttaaggtggtgacgtaacaacgcattgtcttcaacaaccagtacgcgcatttttatttctccctgtcttaattattaaaatagtgtaacgcgattatgtggttatgggggtaaacattaaataaaccagcggggaggggaggtaaagtgaaaaaataaaaagcggataatcttaataagcaggccggacagcatcgccatccggcactgatacgaggtttatttcagctcatcaaccatcgtgatagctcgaccaatatagttagccggcgtcatcgctttcaggcgggctttctcttcttctggcaacgccagaccatcgataaactgcttcatgccttcggcgtcaacgcgcttaccgcgagtcagctctttcagcttctcgtacggtttttcgatgccatagcgacgcataactgtctggattggttcagccagcacttcccagttgtgatccagttcatccagcagatggtcacggttcacttccagtttgctcacgcctttcagggtggattgatatgcaatcaaggcataaccgatacccacgccgaggttacgcagcacggtagagtcggtcaggtcacgctgccagcgggaaaccggcagtttgcttgccagatgctgcaataccgcgttggaaaggcccagattcccttcggagttttcgaagtcgatcgggttaactttatgcggcatggtggaagaaccaatctcaccagcaatggttttctgtttgaagtggttaagggcgatataaccccagacgtcacggtcaaagtcgatcagaatagtgttgaagcgcgcaacgcaatcaaacagttcggcaatgtagtcgtgcggttcgatctgggtggtgtacgggttccactgaatacccagcgaggtgacgaactcttcgctgaactgatgccagtcaacttccgggtaagcggcgatgtgggcgttatagttaccgaccgcgccgttgattttgccgaggatctccacctggttaagctggcggtactggcgctccatacggtaggcgacgtttgccatctctttaccgatggttgacggcgtggctggctgaccgtgggtacgagacagcagcgggatatcgcgatactgaacggcgagatctttaatgccatcaatcagttgacgccagtatggcaggatcacttcatcacgcgcggttttcagcattaatgcgtgggagaggttattgatatcttccgaagtacaggcaaagtggatgaattcagaaaccgcgtgcagttccgggatctccgccactttttctttcaggaaatactcaaccgctttaacgtcgtggttagtggtacgctcgatagttttgatgcgcgccgcatcttcttcgctgaaactggcgacgattgcatcaaggtaaccgattgcgtcggcagcaaaagcaggaacttccttgatcgctgcgtgcgcggccagtttttgcagccaacgtacttcaacttgtacacggaatttcagcaaaccatattcgctgaaaatcccgcgcagcgcgctgactttatcgccgtagcgtccatcgacaggggaaacggcggtcagtgaggataattccatagatcacaactccggggttaaatgagcaagaatttgttttgcctgagtggtcaggcgattacgagaaaacatcagttgcagacgtccgccgccgacctggtgccagagcacggcggcgcgaatgcctgccagcagggttgcgcgaactttcgcctgcacttgtgggctttgcagtacagcaggggaaccggtgacctgaatgcgcgggccaagcgggctaatcacatcaacatagatagcagccatcgcgctcatcagcgtttcggactgtaaatcgaagtgttcgagctggcgttgcaggccgttgatccggttgcccagagtgtcgagcgcgcctttcgctgaggagagtttgcgctcaagcaccatcaagctgagtgtgtagcgggttaattcggcgtttaagccctggcgactgctggcattgagcacgccgagcagggtttccagcccgacgcgcaggttggcttcgctaccgccaaaaaccgccagcgtcgagctggggttcatatcaataatactgttgagtgagacgtgtagcgcatcggcatcacaatgcccctggtgagcgagttgttgcaccaggcgtgccgactgacaaataccggccagggcgagggtgatgtcatagtaattctttgccacgttcactgcttccttgttttaagtaaagataataatcagaccggcagcggcagacgctgctcaataataccgccaccgaggcacacttcaccgttatagaagacggcagactggcccggcgtcacggcggcaaccggttcatcgaaaatcacttcaatgcgatcatcgtccagcgccttgacggtgcaagggatatcggtctggcgatagcgggtttttaccgtgcaacgcatagtgccggtgaatggttcgcgatcgacccagtgcaactgctgggcaatcaacccgacagacatcagccgcgggtgttcatggccctgagcgacaaccagaatgttgttttcgacgtctttgtccaccacataccacggttcttcggtaccttctttggtgccaccgatacccagacctttacgctgaccgagagtgtgatacatcagcccctggtgctcaccaatttcatcgccatcgacggtaatgattttgcccggttgcgccgggagataacggcccaggaactcgcggaatttacgttcgccaatgaagcaaatgccggtagagtcttttttcttcgcggtgaccagaccaagatcttcagcaatcttacgcacctgcggtttttccagttcgccgaccgggaacaggctttgcgcaatctgctcatggctgagcgtataaaggaagtagctctggtctttattgctgtccagaccacgcagcaggcggctcttgccatcgacatcggcccgacgtacgtaatgaccggtagcgatataatcggcacctaaatcttcggcggcaaattcgaggaaggctttaaatttgatctctttgttgcacagaatatccggattcggcgtgcgaccggctttatattcggcaaggaacagttcgaagacgttgtcccagtactcggcagcaaagttaacggtgtgcagttcaatgccgagcttgtcgcagacagcctgggcatcagccagatccgctgccgctgtgcaatattcctcaccgtcgtcttcttcccagttcttcataaacaggccttcgacctgatatccctgttgttgcaacagccaggcagaaacggaggaatcgacaccgccggacatgccgacgattactttttttgcggtttcagacattggatcactcacgacattgaacttcaaggcggcgtattctatcacgcagccttttagatgacaccctttgtaaaaggccagttaaaatcgccaatcatctccagcggataacgttgcccgctttgataacaacgaatactttccgccaccagcggcgaacgaagatttgacgcctgtaaaatttcttcggcgctgacccaacggcagcagtcgatatcgctgtcatgaggctgggtcgggcatatttgctcaagctcaatggcaaagaggaaacgcaaaaacggcgttttatctggcgcaatccactgatgcatacgaataaagtgttgcggctgcgcgctgatgccggtttcttcccacagttcacgggcggcggcttccactaaggtttcatcggcttccagatgcccggcaggttggttccataacgctttaccattaatcgtctcttcaacgactaaaaatttgccttctgcgtgcaccacgcaagcaacggtaacgtgcggtttaaacattttgcatccttaatctgtcacttctcgccattcaccattggcaagattatccaaagagtaatcacccatcgcatagcgaatcagtcgcagcgtggggaagccaacatgggcggtcatgcggcgcacctggcgattacgtccttcatataaggtgatcttcagccagctggtgggaatacttttgcgttcacgaattggtggattccgcggccataaccacgcgggttcgtcaaccagctccgcgccggcgggcagggtagggccatcatttaaggttacgccattgcgcaaggcttcaagtgcgtcttgtgtgggaataccttccacctgcacataatagatttttccggtgcgtttacccggctgggttaaacgcgcctgcaacgcgccgttattggtcagcaccagcaacccttcgctatcgcggtcaaggcgacctgctgcataaacaccctgaaccgggatgaattcttttaatgttttgcgtccggcttcatcggtgaactgcggaagaacatcgtagggtttattgaacaggatcacacgcgtgggctggttttcaggtttacgcctggtagaacgttgcgagctgaatcgcttaacctggtgatttctaaaagaagttttttgcatggtattttcagagattatgaattgccgcattatagcctaataacgcgcatctttcatgacggcaaacaatagggtagtattgacaagccaattacaaatcattaacaaaaaattgctctaaagcatccgtatcgcaggacgcaaacgcatatgcaacgtggtggcagacgagcaaaccagtagcgctcgaaggagaggtgaatggaaagtaaagtagttgttccggcacaaggcaagaagatcaccctgcaaaacggcaaactcaacgttcctgaaaatccgattatcccttacattgaaggtgatggaatcggtgtagatgtaaccccagccatgctgaaagtggtcgacgctgcagtcgagaaagcctataaaggcgagcgtaaaatctcctggatggaaatttacaccggtgaaaaatccacacaggtttatggtcaggacgtctggctgcctgctgaaactcttgatctgattcgtgaatatcgcgttgccattaaaggtccgctgaccactccggttggtggcggtattcgctctctgaacgttgccctgcgccaggaactggatctctacatctgcctgcgtccggtacgttactatcagggcactccaagcccggttaaacaccctgaactgaccgatatggttatcttccgtgaaaactcggaagacatttatgcgggtatcgaatggaaagcagactctgccgacgccgagaaagtgattaaattcctgcgtgaagagatgggggtgaagaaaattcgcttcccggaacattgtggtatcggtattaagccgtgttcggaagaaggcaccaaacgtctggttcgtgcagcgatcgaatacgcaattgctaacgatcgtgactctgtgactctggtgcacaaaggcaacatcatgaagttcaccgaaggagcgtttaaagactggggctaccagctggcgcgtgaagagtttggcggtgaactgatcgacggtggcccgtggctgaaagttaaaaacccgaacactggcaaagagatcgtcattaaagacgtgattgctgatgcattcctgcaacagatcctgctgcgtccggctgaatatgatgttatcgcctgtatgaacctgaacggtgactacatttctgacgccctggcagcgcaggttggcggtatcggtatcgcccctggtgcaaacatcggtgacgaatgcgccctgtttgaagccacccacggtactgcgccgaaatatgccggtcaggacaaagtaaatcctggctctattattctctccgctgagatgatgctgcgccatatgggttggactgaagcggctgacctgattgttaaaggtatggaaggcgcaatcaatgccaagaccgtaacttatgacttcgaacgtctgatggaaggcgctaagctgctgaaatgttcagagtttggtgaagcgatcatcgaaaacatgtaatctctccatgtgttaaatattgaaacgggcgtataacacgcccgttgttttatttatgtggatattattaatagcatatcgagcatatttatatgaagcccattacttgagcccatatgggcatatttttataatgcaactattatgtaaacatttatttgttattttgctttctcctggaggacactcttgactgcttttgagtaaactccataaatccttgttgaatggtgcgatgtgataaatagtaataggatattctttatccttaaggataataccagacttaaccggtgtaaatatactgccaggagggagaaatatagtagattgataccagatgatcattttcatattaccccatatggctgaaaaagatataccacatgtaggttgaattaccgtgtcaattactatccacttcatttgttatgtcttatcccacggtatttaatatggttcattaggatgtttatttcttgattttgcatatgagtatattaccccccctcaaaaaaataaattaattaaaatgatggcttatataaaataaaatttaaagcaaggaatctcaatggatgttaaacaaaatgagattttgtgaaagcaataaattattgacttcgttttagatttgtttagctataatgttatacattcaaatgactgaacatcctgtaattaaaacatagcctttatgctactttgtgccaatttgctaaacattatggttgcctttttatataacgataataatgaatataagcatgacatgagaataaggtttcaatttttgagttatataggaatgatttaacctgttcctggctaaaatacatataaccggatgatgactaaaccaaaatacatgtgcgttaagtattgaaacggacgtgtggcacggccgttgtttttataaatatgttaaccgttataaaataacgtatcaaaagtcaagtgatcacatttcaaatatcaagttgatagtattagtctggtgattatttatgggtgacaataaaaagacagtattaatcatccatagagatagtctctgcacttttatttccattatgctaatgccttactgaattatgaagcatttcttaagtatccaactttagctagattaatggtttattattttctacatcttcaatatataaaagcgtattatcaatggcgtagtaactgcgtttgttatgattaacatcagtaacccaccggaaaacgcccgcgcctgccagtgttgaacagtattcccgaaatgtagattttccgcaaatatgaagcaatgcggcctcttttattttagcagggttcttggtcgtactaacttttaacaggttcctggttcctcttaataacaaaaccgtatcatcgtgagtaataattctgatgttatccgtagccagataataaatgtaatgtgcaatacggtgatgttttaattctgaataaaaccaggagaagttttgctcttttctcacttgctcaaacatcttttgaaaaacaacgacctgatccatcaggataataacctcttgttagttgtgagactgcgtagtgtgcacgatcggttttaccacttcaatctggtctgtcctttggctgtgatatgtacagagtgtgatagagggaatatctgaattctcccggtgagcattttgcaacggaccagctccggtacaaacgctgttgtgggttcagattataacattctgtctaaggggcgggataaaggtgaaattagggggcatgaaagatgactttataaccttgctcaccccagtgttgtaaaagttcgttttgccttctcgttggtgccatgcctgtccagacaatcaatgtttgcgtcgggaacagttccgggcgcggcgattcaatgggatcagcaagaacagaaatgtgccatcctgacaatgataaacgccatgcttccagccacaatcgtgctctctcttcaacattccacgccatcagaatggcttctttaccgggcttacggcgcatttcgaaaagcgaggttgctgcgtattcaattaatgcgccgtcaaacatactgctcataatgcgggaggtgttgtgatcaagcacgagacgctggcgaacaggaaggtaaacatgattaatcaattgatctactgggtactctcgacccagtgaaataattctcgcgcgtagtttggcaggattagccatgcgaagaattgacatcatctcttcttgcaggcggctccagtcatcttccgtatcctggctggtggtttccagtaatgctttaactttgcctacagggacgccattacttatccaacgcttgatctcttcgatgcgttgtatgtcttcttcatcaaagagtcggtgtccgccttcactgcgctgtggttttaacaaaccgtagcggcgttgccaggcccggagagtgacaggattaatcccgcaacgttcagcaacatcaccaatgctgtaataagccacaattcctccttgcggtcacaaatctccgtcgcctgtacacgacccaataatactttgtacaatatacgctaaaattgtacaaagtataaataagatttcagctaaattggatgaaacattatttttaatgtggattaaatttaaacgtaacgtattcattttcacgatgatttactgaaatcatgtgaaagaatgtgctgaaaattattttttctctggccacgctatggaagggataccattcaatttagctttagcaaacagatctccctgaaacatctcaattcctgcggattcaagccacatccactcttctggtgttgccacgcccatagcactgacttgaatttcaagtgatgtacagcattttatgatcgcctgaataattgcctgccgtggcccacttttatgaacattggtaatcaattcctgactgattttaattctgtcaggctggaagcgtgacaggagtaacaaaccagcaaaacctgcgccaaaatgatcaattgctacactgataccagcagcctttagcgatttaatcgcttcggcaaactcatcaaaccgagatatgacttcactttcagtaaattcaacgatgatttgttcaggcaccagagcattggcctttatttcattaagtaaaaaagagactgcgtcaggttcgttaaccagggtcataggtaatagattgattgaaatcattttatcaccgagctcaagtgcgtgtgccatcgtgaatgcaagcgccttacttttgagatccgctgtgtagatttccccgtctttacgctgcccaaccgctatggctgatgggctatcttcatttttttgcacaatggcttcaaaagcgattatccgccgcgataagggatcgacaataggatgaaaggcaaagtggtcgtttatagttggtgaaagggcacaggaatcaagttctttatcagatccgtcagcgataaaaagccaggagtcttcggcagggatctcgaaataggttgattgttcggttgcaaggacaaaagtacgaaaaaattgtagcgctctgtcatcataagttagctgaaattttgatgtgcctttgtcgaatacggcctgtaaaacgtcatctcgctcgtgcaggcgcaaatcaaataattccattcccgctttgccaaaacggcgagcaggcgcgtaatcgcacagcagctcaacaatattatagtgccgtggatcctggcatatagcccgatatatcattttaacctgttcttccggaccttccagaagctggaaaaaatgagaaccattaaacagtaagatccctgttacgtcagactacatgttcctgcgatttgctatcgaaaccatttcttcgatttttttgacaggttcgtcgtcacgtatatggctacgataaataagggtggtaagcattaacaatccagggtaatgggtgaggcgagagtaagacggtaacagacatatcttcttgtgtctttcttttaataccaaaacataaccgtttctttacattgataaaaaatggaaaaagttgaacactagttggcgaaaaatcttgtatagattgtcagttaaatgatgcaatatgttttatcataacacattgttttatatgcattagcactaattgcaaaaaattaatttatcattctgtacacatatttcgtacaagtttgctattgttacttcacttaacattgattaacatttttaacagaggcgtagcatgcatcaaaattcagtgactttagattctgcgggagcaatcactcgttactttgcaaaagctaacttgcatactcagcaggaaactctcggggaaattgtgactgagattttgaaagatggacgtaatctgagtcgaaagtcgctttgtgccaaacttctttgccgactggaacacgcgactggggaagaggaacagaaacattataatgcactaattgggttgctttttgaataatgcaacagcctgattatttaacaggttagctatgaagtcgttatgaagacatctgataatgaacgtataaaatatgaaattactggccaggcggtgctccagatactgcgcatgaagataaatttttcattgcagactcttattaagcaattactcgtaatgaaatcggctgaggaagatgctttccgacgcgatttaattgacagcataattcgtgattttagcaatagtgattcaggagggccaaaccgaagaacagcgacagctgacaataaaagtatgttcaatggtaagaaaataaacagaatacattaaaatttcataagtaagatgagaggttaccatgcttgaagatactacaattcataatgcaataactgataaagcgttagcaagttactttcgcagttcgggtaatttgttagaagaagaatcagcagtgttagggcaggctgtcaccaatttaatgctttcaggcgataatgttaataataaaaatattatcttaagtctgatacactccttggaaacaacaagtgatattctcaaagctgatgtgattagaaaaacactggaaatcgtgttgcgatacacagctgatgatatgtaacttctaattattaagtataagtttatagaaaactcattcatcttatttttgtctgtcgctttagactatacacagcataattttattgggtaatatttctacgaggctgacatgaataattcaatcccagagagatttatttttcaatgtgctttgtttaaaaatctcgagagggaggtgttcatgacgcatgggtatgttgatagtcatattattgatcaggctttacgcttgcgtttaaaagatgaaaccagtgtgattctttctgatctctatctgcaaatattgcagtacattgaaatgcataagactacactaacggatatcattattaatgacagggaatccgtgctctcttagaacttgagtaaggttttagaataaacatcagctgtatcaccatgctgatgcaaagtgagcatttcaggcgttatgctttcttattatgtccgcaatatcaggtgtcaagaatggagagttctcgctctccattcttgacgcctgatatcccgcctaacttattttgtactgcctacattatgctcaataattaatgggttagatcaagatggagaaaattttatcttcggcgtggatatttcttatgctctctaccatgctctctgtagatgccagcgcgagcgaatgaatggcattttcatgtattaaaccctttggccgggacaagcaaatgcgcaatacactcatacccatcctcgttgcgatatgcttgtttattaccggtgtcgctattttgaacatccagctctggtattccgcaaaagcagagtacctggcgggagcgagatatgccgccaacaatatcaatcatatacttgaagaagcgtcacaagcgactcaaacagcggttaacattgccgggaaggaatgcaacctcgaggagcaatatcagcttggcactgaagcagctctgaaacctcacctgcgcacaatcatcattctcaaacagggaatagtctggtgtacatccctgcctgggaatcgggtcctgttgtctcgtattcctgttttcccggacagtaatttactgttggctccagcaatcgacaccgttaatagattacctatcctgctctatcagaaccaatttgcagatacgcgcattttggttacgataagcgatcagcatattcgtggggcacttaatgtacccttgaaaggggtaaggtatgtattacgcgtggcggatgacattattggaccaacgggtgatgtgatgacgcttaatggacattatccctataccgagaaggttcactccacaaaatatcatttcactattatctttaacccgccgccactctttagcttctacagacttatcgataaaggctttgggattttaatatttattctgttaatcgcctgcgccgctgccttcctgcttgatagatatttcaataaaagcgcaacgcctgaagagatcctgcgacgggcaataaataatggggagatcgtccctttttaccaacctgtggtaaatggtcgggaagggacattgcggggagttgaggtgttagcccgctggaaacaacctcacggtggatatatatcacccgcggcatttattccacttgctgaaaaatccggattaatcgttccgcttacgcaaagcctgatgaatcaggttgccagacagatgaacgctatcgcgagtaaattgccggaaggttttcatattggaattaattttagcgcttcgcatattatttcgccgacgtttgtcgacgagtgtttaaatttccgtgacagttttacccgccgcgatttaaaccttgttctggaagtcaccgagcgtgagccattgaatgttgatgaaagtctggttcagcggttgaacatactgcatgaaaatggttttgtcatcgcactggatgatttcggtactggctactcagggctttcttatcttcatgacctgcatattgattatatcaaaattgatcacagtttcgttggccgcgtaaacgcagacccagaatcaacccgaattctggattgtgtattggatctggcgcgtaaactttcgatcagtatcgtcgctgaaggtgtcgaaacgaaagaacaacttgactatctgaaccaaaataatatcacatttcagcagggttattatttctataaacctgttacatacatcgacctggtcaaaattatcctttctaaaccgaaggtgaaggttgtggttgagtgaaaattgatcagcaaggccatagtgcggtgtaattatagacagctaattagctcgttgcctcttgttactattgttcattattttgtttgctataattgtttgaaagttttgacaggattgccattagtagcatgaacaatagtaataatctggattatttcactctctatatcatattttccattgcatttatgctgatcaccctcctggtcatccttattgcaaaacccagtaccgggctgggagaagtgcttgtgacgataaatttgcttaatgcccttgtttggctggcgatcaatctggttaatcgattaagagaaagactcgtcaaccacagggatcagcaataatctttcagtttctcactgtcagtatgcggctgaatgggttgctggcagtgaacgcctggatcattgaaggaaaggcattattgcgcaaatagttgtcaaccctggtgttatcacggttgtttttatatatcaccgaaataatcctcatcgcaactattaacaattttgatgtcgaagagttatttgttaaacaaaatcgtcacctcaaagtgatcaatgtcatgaaaataaggtgaaaaatgataatgccgacttatttatcatttatatattgtcgctgtttatctatttaaattttttgtgcttttgtttttgtctttaccctccgttttggtaatctgagctcataggttatttgaccaggaatgtttgttaatccaatgaatggatggttaatctatgaaactgaaaaaactccccgggtttagtttgggacttattgctctggcggtgggtaatgcatatgcaacacaattgttggatgattatagtataatttcctatatgactgatgaagaatcgccgattgaaatcaaagataataatccgataagtaatggagagtatctaaccactgaagacgaaagccatgctgtgaaagtggatgacggtgtaactggatatataaataatgccagtgtgatgactagtggtgatggatcttatggtatttctgttgatagtcaaaacaaagtattatatataagcgatagcgatattaagacctctggaagcgtatctgacaaagaaaatggagggataacagccagcgcagtagtcagtgaatttggtggcaccatctttatgaatggtgataattcagtcgagtcgggtggggcatattcagcgggacttttaagccaggttaatgattctgaaaagatggtaaataacacccgtcttgaaaccacagataaaacgaacattgttacctctggggaaaatgcagtaggtgttcttgcatgttcaagtcctggagagtctcgaacatgtgtcgatgctgtagatgatgaagttagtgattctaacagttacgaagttattagccgtgctgatttaaaaatgaatggtggttccataacaactaatggcattaatagctatggtgcttatgctaatgggaaaaaagcatatattaatttagattatgtggcacttgaaactgtggctgatggaagttatgcagttgctattcgacaaggtaacattgatataaaaaatagttctattacaacaacaggcactaaagcccccattgcaaaaatatacaatggtggagagttatttttttccaatgtcaccgcggtatcaaaacaagataaaggaatatcaattgatgcatcaaatatcgattctcaagccaaaatagcactattaagtgttgaactttcaagtgctttggatagtattgatgttaacaaaactacaacggatgtaagtatccttaatcgaagtattatcacacctggtaataatgttctggttaataatactggaggtgacttaaacataatttcgtccgactctattctaaatggagcgactaaactcgtcagcggcacaaccacgctgaagctttcagaaaatacaatctggaatatgaaagatgactccgttgttacccatctgactaattcagacagtattatcaatctttcgtatgatgatggtcaaacatttacccaaggaaaaacattaaccgtaaaaggtaattatgtcggtaataatggtcagcttaatatccgcaccgtattaggtgatgataaatcggctacggacagacttattgttgagggtaatacttcgggttcaactaccgtctatgtgaaaaatgctggaggaagcggcgcggccacgctaaacgggatcgaactcataactgtgaatggcgatgaatctccagcagatgccttcagataaggtgatgcaaggattgcagctggagctttcgaatatcaactaaaacaacaaggcaaaaactggtatttgacaagttatcagtcagtgaatgaggaggataacagctcagagggaaattcagaatcaacagaaacgcctacccccgtcctgcgccccgaagctggaagttacgtcgctaacctggcagctgctaacactctttttgttatgcgtctgaacgaccgtgcgggtgaaacgcgctacatcgatcctgtaactgaacaggagcgttcaagccgactttggctacgtcaaattggcgggcataatgcctggcgtgacagcaacggacagttgagaacgacctcgcatcgctacgtctcgcagttagggggcgatctgttaaccggtggttttaccgatagtgacagttggcgtttgggagtgatggctggttatgcccgcgactacaacttaactcattccagcgtgtcggattatcgttcgaaagggagtgtcagaggctatagcgcagggctgtatgccacctggtttgccgatgacatcagtaaaaaaggcgcatacattgactcctgggcgcaatatagctggtttaaaaactcggtgaaaggggatgaattagcctatgaatcctatagcgcgaaaggtgcaaccgtctcgctggaagcgggttacggttttgccctgaataaatcctttggtctggaagcggcgaaatatacgtggatcttccagccacaggcacaggctatctggatgggcgtcgatcataatgcgcacacggaagccaatggctcacgtattgagaatgacgcaaataacaacatccagacccgactcggcttccgcacctttattcgtactcaggagaaaaacagcggtccgcacggtgacgactttgaaccttttgttgaaatgaactggatccataacagtaaagattttgctgtctcaatgaacggtgtgaaagtcgaacaagatggggcgagtaatttgggggaaattaaacttggcgtaagtaaatggcaacctgaatccagcggccagcgtctggggaatgtgggcgtgcagctgggtgataatggctacaatgacaccgcagtgatggtgggcctgaaatataagttctgatcccgccgttagctaaaaaaccgcgtcgtattcatcgacgcggtacatatgaaatattattttttgccgatagcacgcatggtgtcatcaattgccgtgatcaacagcatttgcgggtctttagcgcaaacctgattcagtttttctaccactttggcgctcagttccggagattgctcaatttttaaatcacggctggcaacgctggcattacccattaccgcaacaatttctgcaacctgtgcgctgtcagtttttgccatttcgttggcttctgcgcaagtaatataggtttctgacggcaaaccgtttttaatattgtagtcctgcgcccaggtcattggtgcgaaaacaaacaggcccgccagtaaagcaaattttttcatcatcattccttatttcattttacccagaattgcaccacccgtaccgccaatcacggcacctttaatcgccccttcgaggccattgccggtcagaacgccagtgacagcaccaacggcggcacccacttttgcacctttacgcgcatttttaccgtcgcggcctttttctgttactgcaccaacaccagcgccaacagctgcacctttcagtacgccattaacaccattgccagtaagtaaaccaacgcctgcgcctagcaatgcacctttcgtggtgcggttcatatccgccatcgctggcgtggagcagaacaatgctgagataagcccgaaggcaagtatttttttcttcaacttagatgtccggtattaagtaagttgcacacacaataatttcgtcttcaattaagatctgcttaactaaagaacgctcgctattattcagataattcaaaatgagcgtggctgtgatgataggaattatgttttttacgtgaatgagaataatcttaaatgaggaataactcattgattgacaatatttttattcaagaagtgtcattgactgttaacgcaatgttgtaaaggtaagataatctgatttatcaatattattgtgtgatttttatgtgagcagaagatattcatcagcaacgattacattagtcattttattttgccgacggcctcattgtcgaaagataagcgtacgacagtattatcagaaaagagtgattttttatccaactacacttcagcgcactgcgtgtaaaaaatgcctctttcttatgcgggatatcatcatttcatcatgatgtctttggtgagcggtgaacacaatacacctgcgctgtctcttcaggatgaatcccctggtctggtgcctgcgggctgatgttgcagcagagcttaggtcacttagacgctactatcatttatccaatggcatggaatcgaaatcagtcgatacccgcagtatatatcgtgaactgggtgcaacgctgagttacaacatgcgcctggggaacggtatggaaatgaaccctggctgaaggcggctgtgcgcaaagaatttgtcgatgataaccgggtgaaggtgaataatgacggtaatttcgtcaatgatttgtcgggcagacgtggaatataccaggcagctattaaagcctcattcagcagtacgtttagcggacatctcggggtggggtatagccatggtgccggtgtggaatccccgtggaacgcggtggctggtgtgaactggtcgttctgaccatcaacgattaaactgcgcttcggcgcagttttcgtttacaggatgttgaaagggaaaattctggggcaaaaaaagcccgccagttacggcgggaaacctcatcctatgggagaacaatgaataatgaaattgcggggttatcatctcccagtatatccatactaacaataaggttatttactcaaccaggcataaacattttgttttgtgcgtgggaacagccttaaggtgtaaagggggaggtggaaatagcaatgaggagtatcagcaagaatactcgccgctttaccacaacgtggatgagagggatgaaaaactcaaggcagagataactctgccttgaagataaatgcgcttttacagcgggcttatttcagctcttctgcttccggtaaggtcacgttcagctcaagaatagaaatatcgccatctttttgctcaagctgtacggttaccatctcaggatcaatttgtacgtatttacaaatgacctcaagaatatctttacgcaactgcggcagataatgcggttctgcatcgctgcgacggcgttcagcaacaataatctgcagccgttcttttgcaatgttggctgtgtttttcttccgcgagagaaagaaatcgagtaatgccataacttatcctccgaacaagcgtttgaggaagcctttcttctcttcttcaatgaagcggaaaggacgttcttctcccaacagacgttctacggtatctgcgtaggctttacccgcatcggcgttaatgtcgagaatgaccggttcaccctggttagaggcgcgcaatactgattgatcctctgggatcacgccgacgagtttgatgcgcaggatctccagcacatcttccatgctcagcatgtcacctctgcttacgcggcctgggttatagcgcgttaacagcaggtgctctttaataggctcttcgccattttctgcgcggcgtgatttcgacgccagaatgcctaaaatacggtcagagtcgcgtactgaggagacttccgggttggtggtaataatggcttcgtctgcaaaatagagtgccattaacgcaccggtttcaatccctgccggggagtcacaaacgataaattcaaaatccatcgctttcagatcatcaagaactttggcgaccccttcacgggtgagggcatctttatcgcgtgtttgcgatgccggcagaatatagagattttcagtacgcttatctttaattaacgcctgatttagcgttgcatcgccctgaatgacgttgacgaaatcgtaaacgacccggcgttcacaacccataatcaggtcgagattacgcaggccgatatcaaaatctatcacgacagttttctttcccttctgggccaaaccagtggcgatggccgcgctggaggttgtcttaccaacaccccctttgcccgaagtaacaacaataatgcgtgccatagaaattccttgttaaaaagggatcaatttaacggttgaacggtcaaagcgttttcgactaactgcagtcgcgccgctttgccataaaattctgctgggatttgatcactcagccagtattcacctgcgatggacaccagttccgccatcaggttcgtacaaaatatttgcgtttcccggtcaccacttgcccctgccagcgcacgaccgcgcatcatgccatagacatgaatgttcccatcggcaatcaattcggccccagcgctaacgtggcttgtaacaatcagatcacattgtggagcataaatacgctgaccggaacgcaccggggtatctattaaacgcgtttttgtgaccggcgttgtattttgcgctggagcctgcggtgtgggagctggacgtggcgctttttcctttccttccgtcaggataggcagccccatcttttcaatttcggctttaagttgcgcatctttgcagccacttacgccaataacccgcaaaccggttgccgaaaccgccttatgcatcgctgaccagtttaccgggtcttccagtgcactgacgttgagtacaacgggggcatgttttaaaaatgcgggggcctgagcgattttgtcttccagcgcctgatggataaccttaggttctgcctcatgcagatgaaccacagataaagtgaagctactgcctttaagctcgattggcgtgtttgacatcctggccttactcaattagctattaatcatcgccagcgcgcgatgatgttccgaagactataaggcatgttatagtctggattatattgaggcaagtcaccctcccatttattcagagtaaaagtctattctgtgataaatggcgctgattcatagcttaaaaaatacccttgtcaatcaacccattgccgtcgtacttttgattgttcttatttacgcttcctttttccgcaccctaatcgtgacagcatctccagacctgtttaaatatccagtattgaggcaagtgtattttttcaccacgccaggctttcttaactttccattttttgcggcatcattaaagaacagatacccgttatcttaatatccgccacagaattgctctatcatagaaaccgcagaagacgtctgatacttctgtcaggtcatcgtaactcgtccaggtcagcggttttgattacggattgatgatgaaatgagcataagtgttgtacggttggattatcaggatgtgctatgaatatgatgcgtattttttatatcggattgtcaggtgtggggatgatgttctcatcaatggcgtctggaaatgacgctggcggacttcaatctccggagtgcggcgttgtttgcgacccgtatatttgtgtgaactcagatggcatttccccagagttaacaaggaaatatctcggcgaaaaagccgctgaaaacttacaatcattacaaggctacgatcccagcgaatttacattcgctaacggtgtattttgcgatgttaaagaaaaattatgtcgtgatgatcgttattttggtatggatggtaagcggagtggaaaaatcaatcaaaccaccacaaagatgttatttatgtgtcgtgagtgatgtcttgtttacattatgttctattcgtcattaacctcttgagcgacagagaggagtggggcattaacgtttatgacggggagagtccccgtcggttgacatttacttaatttgaatatcgacgttatattttttagttttgtttttacgggcgtcgtttcgggtttgcaacactcgcagctcatatttgccagaagcagggagtgagtattgtccgtgactatcgagttctggggaatatctggataaatcaactgaatcatcgattcctggcccgaagaggtaagtatcagcgccttcattagagatactcacatgcactttctgaccttttttggcatagaaggtatatgtatcgtaatcgtatccctttatttcgccggagtactgagcgctgctatggccttttctgaactcaacattgacattcttacccgcagcaaagctcgtggaggttagcagtgcaagcagcaatacagccttcctgatgctcttgattttcattggtagtctcctgttcagaatgagtacgatgaactgttataatataacaatccctaacgggagaattccagtggctttcctgcgttcggtaaaatcacgttgcggcatttttgccggggggattacttataaagggggcatggactcaacaaaccgtagaaatctacagctggctggcttgtggcgcgggtttcattgatgttagcttatgccaaaacctggcatcttaaagagtaaaagtatgttttgtgtgatttatcgaagcagcaagcgtgaccagacctatttatatgtcgaaaaaaaagacgatttttcgcgtgttcctgaggaactgatgaaaggttttggtcagcctcagttagcgatgattctgccgctggatgggcggaagaaactggtcaatgccgatattgaaaaggttaaacaggtattaaccgagcaaggttactatttgcagttaccgccaccacccgaagatttgctgaagcaacatctttccgtcatggggcagaaaacagacgacactaacaaataaccgatatccggcggtggcattatctttgtcggcgcgggttttcatatccacgataaggtgaggggaacgttatgtatcaacatcacaactggcaaggtgcgctgctggattatccggtgagtaaagtagtctgtgttggcagtaactatgccaaacatattaaagagatgggcagcgcagtgcccgaagagccagtgctgtttattaaaccagaaacggcactgtgcgatctgcggcagccattggcgatcccatccgatttcggttcagttcatcatgaagtcgaactggcggtgttgattggcgcgacactgcgtcaggctacggaagagcatgtccgcaaagccattgccggttatggcgtggcgctcgatctgacattgcgtgatgttcagggaaaaatgaagaaagccgggcagccgtgggaaaaggctaaagcgtttgataactcttgtccgctttccgggtttattcccgcggcggaatttaccggcgacccgcaaaatacaacgctgagcctgagcgtaaacggcgaacaacgccagcaaggtacgactgcggacatgatccataaaatcgttccgctgatcgcttatatgagcaagttttttaccctcaaggccggtgacgttgtgttgacaggcacgcctgatggcgtcggcccgttgcaaagcggtgatgagctgacagtcactttcgatgggcattctttgacaactcgcgttttgtaatactttttgccgcctgaaagcggcggcaaaacttgcatcgctgtgccagactggttataaggtgcgttttaacgtaatggcggaacacctgatgagcgatgtacctttctggcaaagtaaaaccctggacgaaatgagcgatgcggaatgggagtcgttgtgtgatggttgcggtcagtgttgcctgcataaactgatggatgaagacaccgacgaaatctacttcactaacgtcgcctgtcgccagctcaatattaaaacctgtcaatgtcggaactacgaacgtcgtttcgagtttgaacccgactgcattaaattaacccgtgaaaatctgccaacattcgaatggctgccaatgacctgcgcttatcgtttgctggcggaaggtaaagatttacctgcgtggcatccgctacttactggttcgaaagcggcaatgcatggtgaacgtatctctgtgcgtcatatcgcagtgaaagaatcagaagtgattgactggcaggatcatatcttaaataaacctgactgggcgcagtgataaatttaatagatgctgatgggggctttcttaatatacgtctggatgctcgccatttcgtagccctgtttttgaaagcgctctgtcataatgagagttacccgataccttattatcaacaggtaactctcaatctttaaaaaacgtctgtgtttttaaatgtgataaaccttataccttgagtacatggagagaataatcgcttatcagacttcaggtacctcaaagagtgtctttttaccgtgtcttttctgatactcattacaggtgttaatcatttttttggccgcttcttttagcaaagaaagcattaaatcatcataatcaacgtagaatctggttgtttcagtttccgtttttatctcaccgatggcggctatttcggtggttaatttcaatttggcggcatcgatatctttattcgcttgtttaaccgtgttagacagggtggtaaagaaattctgcacagattttaacttgttcttcaattctggaatcagttttccttcaactacgcccgcagcaatagaataggaaatgattaatccaaatggaccggcgacgacaccggctgcggcaccggcatatgcttccttcctgattttatctacctgtgactggaaatagctgcttttttctgaaaaatcattggttaactggctatctaacgccagcagtttcccggaagcgttgttgaaactttgtgagcttaccagcagggatttttgcgcttcattcagcttcgtgatgccgtcatccagtaccttaatgagaatgtctttctgggcggatgctttcttctcattgtactcatcaaatagcaaaatatacgctgcgagcaattgcgtcgcaacaccacaccattcatacactgtttgggttgcttcaaaatacttatcctggctatccataagtaaggttttaatatcgccgactaaaacggaggctgcctgtgaatactcctgtttaaagcgacttaactcttttatggtttcatcaaaggtctgccaggggatgacctgatcgagatatttattataaagatctaatgctccatctgcggtttcgattgcgtttttaactacttctaccgttttatctgcaacgatttcagtcataatcattcgcctctttaaatatataaattgtaatgaaactcctgttttacaactattaataaattttacttcatctaattcatagttagccgggcgggatgcgtcaatgtctttatttctattaatatgataaatatcaaacaatgtttaatgtcattatggcgaatgcttctattctattttttagccgggtgatatttttcatttctgctggatgagcgtcgtcgccagaaggccacgtgagcacaagataagagaacgaaaaatcagcagcctatgcagcgacaaatattgatagcctgaatcagtattgatctgctggcaagaacagactactgtatataaaaacagtataacttcaggcagattattatgttgtttatcaagcctgcggatctccgcgaaattgtgacttttccgctatttagcgatcttgttcagtgtggctttccttcaccggcagcagattacgttgaacagcgcatcgatctgaatcaactgttgatccagcatcccagcgcgacttacttcgtcaaagcaagtggtgattctatgattgatggtggaattagtgacggtgatttactgattgtcgatagcgctattaccgccagccatggtgatattgtcatcgctgctgttgacggcgagtttacggtgaaaaaattgcaactacgcccgacggtacagcttattcccatgaacagcgcgtactcgcccattaccatcagtagtgaagatacgctggatgtctttggtgtggtgatccacgtcgttaaggcgatgcgctgatgtttgccctctgtgatgtaaacgcgttttatgccagctgtgagacggtgtttcgccctgatttatggggtaaaccggtggttgtgctatcgaataatgacggttgcgttatcgcccgaaacgctgaggcaaaggcgcttggcgttaaaatgggcgatccctggttcaaacaaaaagatctgtttcgtcgctgtggcgtggtttgctttagcagcaattatgagctttacgcagacatgagcaatcgggtgatgtcgacgctggaagagctatcgccccgcgtcgagatttacagtattgatgaggcattctgcgatctgacaggtgtgcgtaattgtcgcgatctgactgattttggcagagaaattcgcgcaacggtgctacaacgtacccatcttactgttggtgtggggatcgcccagaccaaaacgctggctaagcttgccaatcatgcggcaaaaaaatggcagcggcagacgggtggggtggtggatttatcaaatctggaacgccagcgtaaattaatgtctgctctccccgtggatgacgtctgggggattggacggcggatcagcaaaaaactggacgcgatggggatcaaaaccgttctcgatttggcggatacagatatccggtttatccgtaaacattttaatgtcgtgctcgaaagaacggtgcgtgaactgcgcggcgaaccctgtttgcaactggaagagtttgcaccgacgaagcaggaaattatctgttcccgctcgtttggtgaacgcatcacggattatccgtcgatgcggcaggccatttgtagttacgctgcccgggcggcggaaaaacttcgcagcgagcatcaatattgtcggtttatctccacgtttattaagacgtcaccatttgcgctcaatgaaccttattacggcaatagcgcgtcggtaaaactgctgacgcccactcaggacagcagggatatcattaacgctgctacgcgatctctggatgccatctggcaagcgggccatcgttaccaaaaagcgggcgtgatgctgggggatttcttcagtcagggagtcgcgcagctcaatttattcgatgacaacgcaccgcgccccgggagtgagcaattgatgacggtaatggatacactgaatgctaaagagggcagaggaacactctattttgccgggcaggggatccagcaacaatggcagatgaagcgagccatgctttcaccacgttatacaacgcgaagttctgatttactgagggtcaaataaatatagcggcaggaaaaaagcgctcccgcaggagcgccgaatggattagcgaccgaacagatcacgttttttcgctttaaacggctgggaaatcaccaccagcactgcgacaatcaggtaagcgataaaaataccgagcagccactgcggcatttccagacctaaaaaatcccactgacgctcggcgcaatcgccagaggcgacaaacacttgcggcacccacttatccagcggcagccattccgggaaacgaaccataaaatcacaggtggcaaacggcgaaggatagagctgaagcatggtgtgctcgtaagttaactgcacaccgcggaacgcactatacaaccagataaccatcgctacataacgcagcggagttttcggggcgatcgcgccaatcagcgcagcacccagaacgccgaataacgcgcagcgttcataaatacagagcacgcaaggtttcagtaacatcacatgctggaaccacagcgccgtcagttccagtgccagagcagtaaacgccatcaacagccacgcgccccggccttgtgaacattggttcaaaaatcgcaacataatcatttccctgcaatatgcatagagtgcgcagtttaaaccaattcattcgctgcgccaccaggaggcagcaaaaataggacgcaattggacaattatcgggcgaaaaggcaaaccgggcatttatatgcccggtaagttgttatcaaagcgttgctatccagcccatttgcataaaccattcggttacaggggcaagcgtaaactcgacgcagagcaagccgacgagtgtcaggacgagggtgtaaggcagggccatccacaccatgcggccataagagaggcgaatcaatggcgcgagtgcagaggtcagcaggaacaggaacgcagcctgaccgttcggcgtagcgacggagggcagattggtaccggtattaatggcgaccgccagcagctcgtattgcttcaacgtgatagcgccactttccattgccgctttcgcttcgttgatataaatcgtccccacgaagacgttatccgaaatggatgacagcagaccgttgaaaatatagaacagcgacagctgagcatgttccgatgcctgcaacacaaactgaataattggcgaaaacagttgttggtcgataatcaccgcgactaccgagaaaaacaccgtcaacagtgcggtgaatggcagagattcggtgaaggctttaccgatagcatgctcatcggtgacaccggtcaatgatgttgccagaataatgactgacaaaccaatcaagccaacttccgccagatgcaacgccagcgcagtcaccagccagacgccaataatcgcctggacaatcagacggattttatcctgacgggtacgctggtggcggctttgatcgtcaaactgttgcaacacttcgcggactttctccggcagcgtttcaccgtagccaaaccaacgcagcttctctaccagcaggcaggttaacaggccacaaatcagaaccggaacggtcaccggcgacatgcgcaggaagaaatcgccaaaatgccagccagccgctttagcgatgatcaggttctgtggttcgcccaccatggtcattacgccgcctaatgcggtgccgacaccggcatgcatcatcaggctacgcagaaagccacggaactgttccagaaccactttgtaatgcttgtcgatatgactatcgtcttgcaggtcggtgtcttcggtacgggaagaggctacgcggtgataaataccataaaaaccgactgcaacgctgatcaccaccgccacgacggttaaggcatcgaggaacgcggagaggaacgcagccgccacgcaaaaagagagcgacagcagcattttggagcgaatgcttaacagcaaacgggtaaatatgaacagcaacagctgtttcataaaatagatacccgccaccataaacatcagtaacagcaagacttcaagatttgccgccacctcttcacggacgtgttccgcgctggtcatgccgatgaataccgcttcgatagccaacagaccaccggggagcagcgggtagcatttcagggccatcgccagagtgaaaataaattccgctaccagcaaccagcccgcgacgaaagggctgatgaggaaaattaacgggtttacgattaagaaaatgatgagggcgagtttgtaccagtcgggggactggcccaaaaaattgcgccatagcgcgcggccccaggagatctccatgatggtttcccttaccttacaaataatcaatgatgtttttatgtttaaacgcaaagcttaacggtcaggcaggagtgaggcaagtcttgatagtcaaggggaaagagatgcggaaaatgaagccttgatccctttttcttctttttgtctgctatcagcgtagttagccctctggtatgatgagtccaactttgttttgctgtgttatggaaatctcactatggtcattaaggcgcaaagcccggcgggtttcgcggaagagtacattattgaaagtatctggaataaccgcttccctcccgggactattttgcccgcagaacgtgaactttcagaattaattggcgtaacgcgtactacgttacgtgaagtgttacagcgtctggcacgagatggctggttgaccattcaacatggcaagccgacgaaggtgaataatttctgggaaacttccggtttaaatatccttgaaacactggcgcgactggatcacgaaagtgtgccgcagcttattgataatttgctgtcggtgcgtaccaatatttccactatttttattcgcaccgcgtttcgtcagcatcccgataaagcgcaggaagtgctggctaccgctaatgaagtggccgatcacgccgatgcctttgccgagctggattacaacatattccgcggcctggcgtttgcttccggcaacccgatttacggtctgattcttaacgggatgaaagggctgtatacgcgtattggtcgtcactatttcgccaatccggaagcgcgcagtctggcgctgggcttctaccacaaactgtcggcgttgtgcagtgaaggcgcgcacgatcaggtgtacgaaacagtgcgtcgctatgggcatgagagtggcgagatttggcaccggatgcagaaaaatctgccgggtgatttagccattcaggggcgataatcccttccgtttaaagagcaaacccctcaaacgaggggttttttgttgtttttacagatttcccattcttggcgggcaacgttccagcaactcgatgctgccgtcttcgttttgctgttcgagcatcacatcaaatccccacaggcgatgcacatgcttcaggacttctttgcgcccccgatccagcggtgcgcgattatgtggaatataacgcagcgtcagcgaacggtcgccgcgcaaatccacgttccagatctgaatattcggctccagattacttaagttatattgcgacgataaccggttacggatctcccgataaccttcttcattatgaatagcggaaatctccagataattatgccgatcgtcatccagcacggtgaagaagcggaaatcacgcatcactttcggtgacaggaactggctgataaaactctcatctttgaaatcacgcatcgcgaaatgcagcgtttccagccagtcggaaccggcgatatccgggaaccagtatttgtcttcttccgttggcgactgacaaatccgtttaatatcctggaacatggcgaacccgagggcatacgggttgatgccgctgtaccacgggctgttataggggggctggaagaccacattggtgtggctgtgcaaaaactccagcataaaacgttccgttactttcccttcatcatacagatggttaaggatggtgtagtgccagaaggtcgcccagccttcgttcatcacctgagtctgtttttgcggataaaaatactggctcaccttacgcacaatacgcaggatttcacgctgccatgattccagcagtggcgcatttttctccataaaatagagcaggttttcttgtggttcggacggatagcggcgcgcttcagcaaccgttttctcttcctcgcgcttcggcagggtacgccagagcatattgacctgactttgcagatactcttcgcgacttttctgccgggctttctcttcttgcagcgagattttttgcgggcgtttgtaccggtccacgccgtagttcatcagcgcgtggcacgagtccagaagccgttctacttcatcaacgccataacgctcttcgcactcggtaatatatttacgggcaaaaatcagataatcgacaatcgaactggcgtcggtccagctacggaataagtaattgtttttgaagaaagagttatgcccatagcaggcatgagccatcaccagcgcttgcatggtaatggtgttctcttccatcaggtaagcgatacacgggttagagttaatgacgatttcataggccagtccttgctgaccgtgcttatacagccgttcagtctcgataaactttttaccgaatgaccagtgcggatagttaattggcatgccgacgctggagtaggcatccatcatctgttctgaggttatcacttcaatctggtgcgggtaggtatccagccggtagagtttcgccacccggtctatctctgccagataaacatccagcaggtcgaacgtccagtcgggtccatcgctcaaacgtgtggtgtccttattcatagaatcgatcgtcgccatacgcgcacctcattgttgtcggcgctctctgtgtggagcacctcatttcaagcatagaacacctgttaaaaaccgcgtcgccggagaatttttttctttgcgatttcttattatcagagtgccactaatccgcttctgaacggaattttatgctggataaaaagggcgttcagcaggagatactaaagacgccatattgccgcagagtcagggagatgtgagccagctcaccataaaaaagccgtatgttgaataatattttcaactgagttatcaagatgtgattagattattattcttttactgtatctaccgttatcggagtggctatgcgagttgtcatactgggaagtggtgtggtaggcgttgccagcgcctggtacttaaatcaggcaggacatgaggtcaccgtcattgatcgggagccgggggccgccctggaaaccagtgccgcgaatgccgggcaaatctcccccggatatgctgcaccgtgggcggcaccaggtgtgcctttaaaagcgattaaatggatgttccagcgccatgcgccgctggcggttcgtctcgacggtacgcagttccagttgaaatggatgtggcaaatgttacgtaactgcgacaccagccactacatggaaaacaaagggcggatggtgcgtctggcggaatacagccgtgattgcctgaaagcattgcgcgccgaaaccaatattcagtatgaagggcgtcagggtgggacgctgcaactgttccgtaccgaacaacagtatgaaaatgcgacccgcgatatcgccgtgctggaagatgccggcgtaccgtatcagctgctggaatccagccgcctggcggaagtggagcccgcgctggcagaagtggcgcacaaactgacgggcggcctgcagttacccaatgatgaaaccggagactgtcagctatttacccagaatctggcgcggatggcggagcaggcgggggttaaattccgctttaatacgcccgttgaccaactgctttgcgacggcgagcaaatctacggcgtgaagtgtggcgatgaagtgattaaggccgatgcgtatgtgatggcgtttggttcttactcgacggcgatgctcaaaggcattgttgatattccggtgtatccgctgaaaggctactcgctgaccattccaattgcgcaggaagatggtgcgccggtatccaccattcttgatgaaacctacaaaatcgccattacccgtttcgataaccgcattcgtgttggcggaatggcggagattgttggttttaataccgagctgttgcaaccgcgtcgtgaaacgctggagatggtggttcgcgatctctatccacgcggcggtcatgtcgagcaggcgactttctggactggtctgcgcccgatgacgccagacggcacgccggttgtcgggcgtacacgctttaaaaatctgtggctgaataccggtcacggcacgctcggctggacgatggcttgcggttccggtcagttgttaagcgatctgctctctggtcgcacgccagcgatcccatatgaggatctaagcgtagcgcgctacagccgtggatttacgccatcacgtccgggccatttacatggcgcacacagctaaggaaacgagatgacccgtccgatacaggccagcctcgatctgcaggcattaaaacagaatctgtccattgtccgccaggccgcgacgcacgcgcgcgtctggtcggtggtaaaagcgaacgcttacgggcatggtattgagcgtatctggagcgcgatcggggccaccgatggctttgcattgcttaacctggaagaggcaataacgttacgtgagcgcggctggaaaggaccgatcctgatgctggaaggatttttccatgctcaggatctggagatttatgaccagcaccgcctgaccacctgcgtacacagcaactggcagctcaaagcactgcaaaatgcgcggctaaaagcaccgttggatatttatcttaaagtgaacagtgggatgaatcggttgggcttccagcccgatcgcgtgcttaccgtctggcagcagttgcgggcaatggcgaatgttggcgaaatgaccctgatgtcgcattttgccgaagcggaacatcctgatggaatttccggcgcgatggcgcgtattgagcaggcggcggaggggctggagtgtcggcgttcgttgtccaattcggcggcgactctgtggcacccggaagcgcattttgactgggttcggcctggcattattttgtatggcgcttcgccgtccggtcagtggcgtgatatcgccaataccggattacgtccggtgatgacgctaagcagtgagattattggtgtccagacgctaaaagcgggcgagcgtgtgggctacggcggtcgctatactgcgcgcgatgaacagcgaatcggcattgtcgccgcagggtacgccgacggttatccgcgccacgcgcctaccggtacccctgttttagtggacggcgtgcgcaccatgacggtggggaccgtctcgatggatatgctagcggtcgatttaacgccttgcccgcaggcgggtattggtacgccggttgagctgtggggcaaggagatcaaaattgatgatgtcgccgccgctgccggaacggtgggctatgagttgatgtgcgcgctggcgctacgcgtcccggttgtgacggtgtaacttgttgtaagccggatcggaggcaacgtcttctgggtgcaaaaaaatcatccatccggctggtcagcaactgtagttgttaatgtgacagagccattgcccatgatagtgtccattaaaaggatggacactatttccccggaacctgaactcaccgcacaggcgttctacataaaacgcttacgcttcattgttgactcgaactcgacttcagataaatcacgctttacccttgatggagcctgtacatagatttgtgtaattgcctgattttgatatgttcaattcaacatcaaatgaaggttaaattatggacgacaaacaattgcaggctcaggctgcgttcagcaaagcatcgcaaccggcgatagatgcttcattaaatttaagattcagcttcctcttcagccacccgtacgccaatcttcaacacttcattatcttctttctcggccaccgtccagatcatcccggcaaactctacctggtcaccgacaaccggtgccgcgcctaacaactgctggacaatttcacccagcgtttgctgcttatcacgatattctcgcccgtcttccaggccatatatcagcgcaacatcagcatatttggcgctggcttcgagaatgaagtcaccaaagaagcgttgatccagcgcgaccggcggcgactggctgaacagtttaccgagcgccggaagatcgcgttcccgaccaattacacacaacacatcgccttcgcgcagtcgggtgctgccggtaggatgaagcaactggttatcacgaaacagtgccgcaatacgcgtctcttttggcatatgcaaatcgcgcagtgccgcgcccacgcaccatttatcggcactcaattgataaacaaactgctcccacggattttccggatgaatatccaggccaacgcgtgacaccggacgtcccactggcggaaccaccactttggcttttttagccgcccacgagagtgatgttccctgcaagagcagtgaaaccagaaccacaaagaaggcgacattaaagaacagacgtgcattctccagccccgccatcatcgggaacacggccaggatgattggcaccgcgccgcgtaatcctacccagctgataaacacgcgctcacgcagattgaaaccgcggaaggggagcaatccagcaaataccgaaaggggacgggcgaagaatatcatccatgcggacaaaatgagcgccggaatggcaataggcagcagatcgcttgggttaaccaacagccccagcaccaggaacatggcgatttgcgccagccaggcgaggccgtcgaaattttgcaggatgccgtagcggttgcgaatagggcgattacccagcagaaaaccgcacagatacaccgccagaataccgctaccttccagcgcagtagttaatgagaaaatcagaataccgccacttaatgccagcaatggatataatccggcgggcagggcgatgcggttgatcatttgcagtagtaaataaccgccgccaagacctattacaatgcccagaccaaattgttgcagaatatcgacaatgaacatccagctaatattgctctcatgatgctggatcatcgcaattagggtaatcgtcagaaagaccgccattggatcattactgccggattcaatttccagcgtcgagccaacacgttcgttaagccccttaccacccagcagagaaaagaccgctgcagcatcggtagagccgacgatagcgccgattaataagccttcaatcaaatcaagattaaacagccacgccgccatcatgccggttaaaccagaggtgataagcacgcccagcgtcgccagcgacagtgccggtcctaacgccacacgaaaggaactggcctgagtgcgcatcccgccgtcgagcaaaataatcgccagtgccaggttacttaccatgtaggcgaaggggtaattatcaaacgggataccgccgacgccatcgactcctgccagcatgccgatcgccagaaaaataaccagaataggaatgccaagacgggaagaaaatgaactaagtaatatactgctggtgacaaggatggatcctaagatgaaaaggctaattattgttgtggcatccaacggtcggttactcctgattacgctgtctcttatataaaccctaccatattagcggcagagacagcgttttacttagccctgaagcgtgatttttttacattttaagaacaggatgaccgctaatcgtcaactgagtgccttcccgggtgttattcagaatggcatgtgcgcccaacggcagcgtaaccgtgcgttgttcatgaccaaaatcgaggccggtaatgagtggaatcgacaggcgggaacgcaaaaacgcgtacactgactccaggttgtaacctgcgtcataatcattgggcgtgctgccgctaaagctaccgagaataatcgccttctgacgtggcaaaattcccgcatgatagagctgcaacagcatacgttcgacccggaaagggtgctcgttaatatcttccagcaccagaataccgttctcaatttttggcatccacggtgtaccgatcagtgaaatcagcatcgcaagattgcctccccacaacgtgccttcggcccgacatgtcgggccttccccttgccattcaatggtgaaggtttcattgcgtaacgccagccagaaatggtgctcggtaaaggcgttcagttcatccgcgccaaagtttgctaccagcatggggccgctaaaggtgatgacattgccatgcgccagaagaccgcactgaatggcggtaaaatcgctatgtccgcaaatgagcaacgggtcatgttgttggcgagccaccagtgcctgccagtcaatatctgccagtaaacgactggcaccgtaaccgccgcgtacagccagcacgatggtgttgggggtagtcagtctggcaagggaattgagatcttccagacgctctgtttccgtacccgcaaaacgctcacaacgacgggcaataacctcgacgttattgacttgatgccccgcgtcggtaaggcgctggataccacgcagcgcggcgtgctgtttaatgcagtaacccgatggggcaattaagtgaaacagagacatggcaattccttgctgacaacagaaacgaaatgtatatcatgccgcttaggtgtgccgttgtcacctcaacggcgattccaggctataaggatagaagaagtgaaattgagatggtttgcctttttgattgtgttattagcgggttgttcatcaaagcatgactatacgaacccgccgtggaacgcgaaagttccggtgcaacgtgcgatgcagtggatgccaataagccagaaagccggtgcagcctggggcgtcgatccacaattgatcacggcgattatcgctatcgaatcgggtggtaatccgaacgcggtgagtaaatcgaatgccattggtttgatgcagttaaaagcttcaacctccggacgtgatgtttatcgccgtatgggctggagtggtgagccgacgaccagcgagctgaaaaatccagagcgtaatatttcaatgggggcggcttacctgaatattctggaaaccggcccgctggcaggcattgaagatccgaaggtactgcaatatgcgctggtggtgtcatacgctaacggggcaggtgcgctgctacggactttctcgtcagatcggaaaaaggcgatcagcaaaatcaacgatttggatgctgacgagttcctcgaacacgtagcgcgaaatcaccctgcgccgcaggctccgcgctatatctacaaacttgagcaggcactggacgcgatgtaaatcagtcgcgcactttgtccgctttttcccgggcttctcgctcgagagagaaaataatccgctgtaattgccgctccaccgtcgggctgacgttaagaaaacggaagctcagacggggagtggtgatggtttcattcttgccatcaatcactttgcgctcgctgatggagattaactgggcgtcaaagtgaaaaacaccccattgccccatgttgacttcaatctgagcgaagcgcatgccttcttgtaattcggcaggctttgctgtttccagtaatgcgcccatgccgcctaacgacaaatcatacaggcggaaacgtaacgtactgttatccgccagtttggtctggcaaaaataaggcggatggagtggggcggagatgcggaaatatcggcgtcgttgtacaaaccataaggtgggaggcggtacggtaataaatgccggaagctgcaagtattcactctgctgtagttgttcaacagtaaactcgactttcgcaccctgagtttcggcggtaatggtaatgtgctgtgcctttagcacggcgatgttgtcttcggcttgactgccgaaatccagcaccagtttatccggggttattgccagtaatttgctgatcagctgcccgccattccaactgagacgcaaaggaattgcggctttgtgcaaatcgcgtaacacgcccaggacggctaacggattttgtttcaggaactgctcatggtaatgactcacgcggaaaaactcctgactgacaaactgtctttggtttatcggtcacagttaacaaaacttaatacaaatgcgtgaatattttttacatgttgttcttaaatcagccgacatacgcccagcatcgatcccgcccttgcctatacttagagcgttgatgtaagcatttcttgcgtccgattcatcgaaacgagggcctgaacatgggaattattgcctggattatttttgacctgatagccggcattatcgccaagctaatcatgccggggcgtgatggtggtggatttttcctgacctgtattctcgggatagtcggtgcggtggtcggcggctggctggcgaccatgtttggcattggcggctccatcagtggttttaatctgcacagcttcctggtggcggtggtgggagctattctcgttctgggcatattccgcctcctgcgaagagaataagattttcataaggcggatagcgatacagatgccgctatccgctttcacatcagaacgtatactcgacacctgctttacgggtgaaaaaaatcaatatagcacttcgatatccgataaagtcggttcccggtaacaacaacagaatccttttttaattattgtttcgttgtttttggtgtgattcagaaaataaatattttagacagtagccagtcaggcgttaaaaatggggcggatagtgaggcggttttggctgcgcttattgaacatttagaattgatcaatccttctggcagattaagccaaaatacccgttcggcaatgcttcagttacgcgaagaggaatggtctgaattctttttttggttgctaaattctctggagtgtctggattatgtgattattaatttaactccagaaagcaaaaaaacgttgatgagtgaacaccgtaacaatattcaggtagcaattgatgctttatatagccaacgtcggcgtaaatcgccgggtgatgaaagtgaaacacttacccgtagaaatgacgctatcttcggcaaccacgtatggcaaacatttgcgcaatacttcccgccaggacttgaaaaaccgtctgtgtagaaaaaaccatagctatggtgttatctgccgacaacgccatccggagaagccgaatgacgttgtcggagtaagcgctggttaaggtgtgggttgtgcctctttggttgagggttgcgtcgttgctgacttaacggtcggacgcgtcgccggaacattgtcacacggttgctctttcgggcagatcaaatccagcattttcagcgtcacgccattggtccagccaaagccatcctgtaatggatattcgccaccgccgccccccgttccggtggtgctgacatcatatttttccaccagctttttctcccggtcataggtgtgctgaacattggtcaggaagtgccagctaatgtccatcgccacctctttttgcccgtagttttgtaatccttctgtcgcgacccactgtaacggtgcccagccatttggcgcatcccattgttgcccacttttcaccgacgtggtgttcaggccgccgggttgcagcagatgtgttttcgtcgccgtcgccattttgttggcgcgatctttcgctgccgcattgacgtacagcgggaacagggcggccgcggttaactgattgcgcactttatgacttttcaggtcgtaatcggcataccagccttgttgatcgttccacaggtatttttcgatccctttttgacgggcatttgccagcgtttcgtactggtttgccatcgcgttatctccggcagctttgctggcgcgggcgaggattttttccattttaaacatcaggctgttcagatcgaccggtacgatgctggtggtgcgtaaggtatttaactgctgcgggttgtccatccagcgcgagctgaaatcccagccagacgcagcggcagagcgcaggtcgcggtaaatttcagtggcaggtcgattcggattgcttttggcggtggcaatatcttccacccatgactctggtcgtggcgtatcgcgatcgtcccagtagcggttgagaagggtaccatcctgaagtttgacaacgcgtttttcctgttgtccggcttgcaggttttcaacaccgtccatccagtaagcatattctttttgcatttgcggcaggtattgcttcaacgcggcatcgccttcatgctgcgccagtaactctaccatcagggcaaagaagggcggttgcgagcggcttaaatagtaactgcggttgccgttgggaatatgaccgtaagtgtctatttcatgagcaaaattggccaccatatccgcgactttatcccagtgaccgctttcggcaagtcctaacatggtgaagtaactgtcccagtaatatacctcgcgaaagcgtccgcccggcacgacataaggttccggcagcggtaacagagaatcccatttttcggtgttttcggtagaacgcgttaataccggccaaagtccgtcaatatgttcgcgcagtgactgcccctctggcggaacatatttctcgccttctttcggcagggtgaaattgacgttaacgaaatggcgcagatcaaatccgctctggttttgctgcatccgataatcagcaaggatcatcagcggatcgctgttcggcacggcatcggcaaaggttttttggtccggaaaaagtttggcgttttgcacatcattaaacagcggccctaataaaatatcaggcggctgtggtgttaccggtgtttcttctgcctgcaccgatagcgcagcgaaacacaaaaagatacaggctggaattaacgccattttttgcgggcgagaaggtgcgggggatttcatcaatcattctcctttggcgaaaccgaataaaacggtattcaagtatcagaaaaccttagttcaggatcgcactagctgcatgatcgaaatctcattctgcgaactgtcaggcattttagaaaagggaattaaagggataaataacggcgaaatagagtgatcaaataacgtctgtttattagccagccagcggcgttgggttcgtgattagcgaagaaaaatcatcataaattggtgaaaaatataacaggtagttaaaaaccattagtgctgagtaaattgccggatgacatcagaacgatgccatccgaacagtggcttaaccctgacggttgaaacgttgcgttttaacgtccagcgttagcgtttcttctggttgtatcgcatacagtttctcaccctgctggcaaatccagccaatccccagttcacgggcgattagggcgctgtgggataccggacttccggcgctaaggcagataccttttacaaccgccggatccagttgcagtactgtggaaggataaatgttctccgccagtagaatagttggcgagttaaactgcgggagttcttctttcgtttgggtcaggtggaccagggtgcgatgcagaagatcgtccacatcaatatagcgagcttgtagatattcatcatccagttgctggtattgctggctaagttctttaagaacttgctgccaggcatattctgccgtgcaatgttcatgctgaaggagttcgcttgccgccgccagcagttccggatcatctaacagtgtatggtgaccagaaaagattgcggcaatatcgtcaagcccgctggcttctgctttcgctgttaacgtcatcagatctaataacgtgaagtcaatagcctggcgtaatcgatcttgttcttcttccacggtcagggttgattttgcctgtaccgtacataaaactggttgataataaaaggctttacccgaaacaggcggaacgggacgcagagtaggtggagcgacttcctccgtttcaccaaagttatcttcagccagctgacggaaagcgatcagtgcctcttcagcttctggccctttcgcaatcaggcgcagcgtatcgttatagcgaacttgtagtaacgcaatctggttaatactctctggtgtgacgcatttgccgtttttttccagcaacatatcggcattaaatgtcgataaggtataaaccagccgggaggccggacgtacatgcaggccgttacggttttttatgaccaccgccagagaacgggcttcttcatcgtacgcaggacatgtgtcagagatttcagtgtcggaggacggtaaacccagttgttcacgtttggcttccagcgcatgcatggcgtcaaagataactttgtcgatatccgcccccgaggccgcgctgaccgttgctgccagtgtaccttcgaccaacggcgcagcacacaaacgtacttttgcggcgatctcgggagccagcaattccagcgcagtttcagcactcaataatgcgctacccatatccatcatgaccagcacatggtcggcatcagcaacagattcgatggcctccatcactttgacggcatcggtaccaatgggattttgtggatcgtcaattcccgcggcaatggcgattttacaactatcactcattaacatctgacgggctaattcaccgacaccttctcccagtcggctgctatgtgaaactatgaccaggtttaccatcaccaattccttactcttttgcggctaacgccaacatttgcatcataaacatcaccgaggtcgcgccgggatcctggtgaccaatactgcgttcaccgagataactggcgcggcctttgcgggcttgcatcgtaatcgtactttgtgcagcggattcggcgatgctactggcagcttcgagcgccaccggaacagagagattttgctcgctggactgacgtaacgattccaccaccggcacccacacatcacacatggttttatcgccaggttcggctttcccgcgactgattacgccgtccgcgccatcgcggaacatctgataaagctcttccagtgtcaggctttgccgtgcctgggtcgcctgtgcggcgcggataaagaaggtaccgaacagcggaccactggcaccaccgacgctggaaagcagcgtcataccggtattcttgagaatgaaaccgatatctttatctgcgatagcagggagtttttccaccactttgctaaagcctcggttcatatttagcccgtggtcagcatcgccaatttcgcgatccagtccggtaagatactcgctctcggtgctgaaaatatcgccacaacgagtgagccagttaacaatttgagttctgctcagtgacattgctttctccttatttaccccagttaagggccggggtgtggaccggggcgtcccagagtgccagcgtttcgtcatcaactttcagtaaggtgattgagaaaccggtcatatccagtgaggtgcagtacgcgccaattaaattacgttcgatagtcaatcccgcttgctggcaacgtgtggtcaggcggttatagacgccgtacagctcagaaagcggagttgcgccaagattgttaaccagcgcaatcacccgatcgccagactggagcggttgtttggtttgttgttcttcctgccaactgccttgttgataatcccagaaacgcaaagtgcgatggtatgagccatttaccagcagggtgtcgaacatttcatcgacggtttgatcaagggaagagaaggggcggcggtcaatacccggctcaccatgaatgccgacgccaaactccatctcattatccgccagggtaaaagaaggtttgcccgcggcaggaacggtacaggcaccgagagcgatacctattgagtggccttgattattcagcttacgccccagttccgcacaggcgtccagtgagtcgccacgctccgccgctgcgcctacgagtttttcaattaatacggtgttggcaacgccgcgtcgcccggcagtataaagactgtcttttaccgcaacgtcgtcatcaatgaccacagtggtcacttttacgccgctatcgtgcagtaactcggtcgctgtttcaaagttaagaatatcgccggtgtaatttttgataatcaacagtacaccttcgccgccatcaacttgcatggcgcattcaaagattttatcgggcgtcggtgaggtgaaaatttcgcccggacaggcccccgaaagcatcccctgaccgatataaccacagtgcatcggctcgtgtccgctgccgccacccgacagcagggcgacttttcctgcaacaggggcatcagctcgggtgacatacaccggatcctgatgcagtgtcagcgatggatgcgctttcgccagtcctgccagttgttcgtccagtacgtcttgcacatcattgatcaattttttcattattttgctccagcaattacggtagggcatggatgatgttcaacgacacggcgaccactgactgccgatgaatccattgtgcatcaggcaagggaaaagaaaattagcccaaattatgtttcatagtgaaacatatgctttaatgaatgttccatattgaaacttttacgtgtattaatacttaaaattgcgagccggaacaccttttgtcataagggatgcgggatatgagtggcgcttttaacaacgatggtcggggcatatctcccttaattgcaacctcctgggagcgatgcaataagctgatgaaacgggagacatggaacgtaccacatcaggcccagggcgtgacatttgcttctatttatcggcgtaagaaagcgatgctgacgctcgggcaggctgcgctggaagatgcctgggaatatatggcaccgcgagagtgtgcgctgtttatcctcgatgaaaccgcctgcattctcagccgtaatggcgatccgcaaaccttgcagcagctaagtgcactgggattcaatgacggcacgtattgcgccgagggaattattggtacttgtgcgctatcgttagcggctatctctggtcaggccgtgaaaacgatggccgatcaacatttcaaacaggtactctggaactgggccttttgtgcaacgccgttgtttgacagcaagggccgattgacgggaacaatagcgctggcgtgtccggttgagcaaactaccgcagctgatttgccgttgacgttggcaatcgcccgcgaggtcggaaatttactgctgacggacagtttgctcgctgaaactaaccgtcatttaaatcaacttaatgccctgttagaaagtatggatgatggcgtgattagctgggacgagcagggtaatttgcaatttattaatgcccaggcggcgcgggtcttgcgccttgacgcgacggcaagtcagggacgggcaatcactgaactcttaacgttacccgccgtattgcaacaagcaataaaacaggcacatccgctcaaacacgtagaagcaacctttgaaagccagcaccagtttattgatgcggtgataacccttaaaccgataatagaaacgcagggaaccagctttattttgttgctccatcctgtggaacagatgcggcagttgatgaccagtcaattaggaaaagtcagccataccttcgctcatatgccacaggacgatccgcaaacccgccgcttgattcattttggtcgccaggcggcgcgcagtagctttcctgtcctgctttgtggagaagagggcgtgggcaaggcactgctaagtcaggcaattcataatgaaagcgagcgtgctgcaggtccttatatcgccgtcaattgtgagttatatggtgatgctgcgctggcggaagaatttattggtggcgatcgcacggacaatgaaaatggccgtctgagtcggctggaactggcacacggcggcacgctgtttcttgaaaagattgaatatctggcggtggagttacagtctgctttgcttcaggttatcaagcagggggttatcacgcgactggatgcgcggcgtttaataccaattgatgtcaaagtgattgcaacaacgaccgcggacctcgcaatgctggtggaacaaaatcgttttagtcgccagctgtattacgcgctgcatgcatttgaaattaccatcccgcctctgcgtatgcggcgtggcagcattccggcgctggtgaataacaaattacgcagtcttgaaaaacgcttctctacgcggctgaaaattgatgacgatgccctcgctcgcctggtttcttgtgcatggccaggcaacgattttgaactttacagcgtcatcgagaatcttgctctgagtagtgataacgggcgcattcgcgtcagtgatttgccggaacatctgtttaccgagcaggcgacagatgatgtcagcgccacccgcctttccaccagtctgtcatttgcggaagttgaaaaagaggcaattattaacgcagcccaggtcacaggcggtcgcattcaggaaatgtcggctttacttgggatcggccgcactacgctgtggcggaaaatgaagcaacatggcattgatgcagggcagtttaagcgccgggtatgaaagacagaaacgatttctgatacatcagagtgatctgtatttcattccggcgcacgctaacaattttcagcatcgtttaagggcttgtctatcccgcacttaaaagctgaagcgatatcctccgttgacttgcttctgatcaaagaggttaccctgcgtgtaatccgcttcgagatagaatgtgtgctgtttgttatactgtgcactgactcccacgccgttattccagccattacctttgaaactgtacttctcccgggagttgttcaacagatattcggtatcccctgaaaactcgcggatagcgccagtcttcacatagacattcagctggctgttgcctgcggtgatgtcataccccagtatcatgctggcacgccccagcagcgattcgtagtgattcagatgtatattgaggccattactcgccttcatagtcatctcattctggtggctgtatgtaagctgggtttgcggctctatatagaacccataaccagtaggggacaggttgaacctctgcccggcttccagggagatgctcattccattcgcagtgccgttggcgttaacgccgttgttctgactgtccagtacgtggaaactatttttctggcgcgatgcttttataacgagatcgctgtaaaaaccgttttgtgccatgtaactggcgtacattcccatgtagtctgaacgtgcggtaccgtcgcctccgctatagtccggcgatgcatgtgttgagccaatatacagaccgacatacaacggcattacatcagagagacgtttatccccaccaaactggataccgctgtaacccatgtcaaagccgctcagtttgccactggcaaaggagtccaggcttcccccataactgcgcaaccagatattaccgtctttactctgatttcgcaggtcacccatccgttgcatcagcgtacggttttcaacatagttcaataagtaaccgacattgagataattgccgccagcatctgcggtcgtggtgggtttaggcgtgggagcgggttcaggcgtaggatcggggttgactatgggaggctgagcgggagctggtgtgggttcaggattaggagtcggttccggaactgtcccggaagcgtaaagctcccagttagtgccatttttacgcacatcgtacagatatccccccaactcaacctgagaagacgcgctgaacgaggccgcgccgtcagtggtttttaccactgtcagaacttcatttcccgttgtggcctcgctgccctggttgcggatagccaatacgtgattaccagcactactcccgctgatattcaataaatcccctttattattaacgccattaccctcgccaacaacatcagcacgcataataaaggtactgttaccgctcaggttctctacgtttaatgtggcaaatgtgccggcagttgacccgtggctggcaaaatcgacagttgaatggctcagcgccagcgtgtcgagattagaattacttgttacgttccagacgctgttattcattgcaacgtccagttttccgccattgacattatcgctgagggaggaacctgtccaaaccgacccagggtgcatatccagattgattagcccacctttggaaagaacgctaccgttgataagcatacgacccgaggcgttgatgcggctggcggcataaccatcgtcatgttgcgttgcgatggccatctggtcgggtgtactcatatcaatgaccagatcgctcgtgaggtcgatctggctgttggtcatggcataaattcccctggctcctgccgcgccggtgatagccaaactgtctccggttattctaccgccgctgagagcccacaaacccagcgccagactgccattacgatcaactgtaatatcggtattttgcatgttgacaacagccgttgccgtctgggccgaggcaccataagaaccgccggaaaagatgctgtttcgttgcgctgccgtgccagtaaaattgattatcgcgtctgaaccactggtgacgaggccaccgccctgcgcggaagaaatatggctatctgcaccgatagtggttgtaccaccacgaacttcgacgccattggccgcggctccagttacatcaacagtgagtgcattcgcgctaacctggccaaagctccagaggccgtgagcattatcgccattggttttaatggtactgtttgttccgagatcgacaacagagtttttctgtacgtttatccccatggcgctgtagccctgaacatcgattgtcaggtctgtagccgtaaaacgcgcagcaccattggcgttattgccgttgagaccaccgatataaacacctgtacttccatcggtcgtgattttacttccgcttccaagatcgacactggtgccatagtcattgatggttaggcctataccgttcgagttttcaatggtgaattgagtggctgttagtgttgagctatgcccaataatgatgccgtcatcgttactcttaatggtgctgcctgtgcctaagtcagcatgggtatagtcaccaattaagttaatgccgatggcagaggtttgaccaacaacatctactgtgagtcggttagctgtcagggagctgtttttgccctgaataatgattccttttgcatatccagaggcgtcgttgacattgacggtgacatcattacccaggttgatattgccaggcgtgtttcctgctggggtcattacaccatagaggtttcctgatggatcggcggtatctcctgtaattctgtcaccatcattaatagtaatattggtgccatattgacttcctgtatcagcagctatcagcaggggggaaaagataattgcattcaaaccaatagcgccaaattttatcagttgaattgagggcgaacggatttttaattcagcgagacgatctgctttggtattcccattgtgttgtttgatgcccataccactcctatatagtacccagactatgggtctatggattttgtcattttgtttaaatcaatgaataatatcctcttatcatcatgatatttgtatggtgcaatcatgatgagcttctcagagaataattctctattaccgggcaaaatcaggaacacaggaattaatatatatttaacatcccccttacaaaggtgagtttatatcgagttattccctaagttgtcgttacttattccaattcgttactataaatatggcaaaaatattacaacaaacagcggttaaaaaatttggtgaagattttttgtaataatcctaattagttatgggaatttcgcttgatgtatctgcataacaaaaacaatatgcgccatttttgcattactaataagaaaaagcaaaaaacatcgatattcatttttggtcaatgggttttctggcctatcgttgttattgtgctactggttatcattttcatcttgccagcatattggagcgtgatcaattttgatcagctgtgaagggggctgatgtgtagtgatacaaaaacttacgttatatcactgctaatgagatatccgtcatctgaacacttatgtctttaattattctcgtggttcactataggcaataagcacaaaagtgtgggatgttacaagaatgattaggactcggtgaaatgaaaaatccacgcaattgcgtggattttatatacttttgcgctcttcatgagatttagcgaaacctcatgagacaataaattaattagacgttgaaaaggaagttcatcacatcgccatctttcacgatgtaatctttaccttctgcacgcattttgcctgcttctttcgcgccttgttcacctttgtaagtgatgaaatcttcaaacgagatggtttgtgcacggataaagcctttttcaaaatcagtatggattttgcccgctgcctgcggcgcggttgctccaaccggaatggtccatgcacgcacttctttcaccccagcggtgaagtaagtttgcaggttcagcagtttataaccggcacggatcacacggttcaggcccggctcttccagcccaagctcctgcataaactcgtcacgttcttcgtcatccagttcggcaatgtctgcttcaacagcagcacaaaccggaaccacaacagaaccttctttcgccgcgatttcacgcacctggtcaagatatgggttgttttcaaaaccgtcttcgttgacgttggcgatgtacattgttggtttcagcgtcaggaagctcaggtaacgaatagccgctttctcttcagcgcttaaatccagcgcgcgcagcatacctgcattttccaactggggcaggcatttttccaggaccgccagctcagctttcgcgtctttatcgccacctttggctttcttctgtacgcgatgaatcgcacgttcgcaggtgtcgaggtctgccagcgccagttcggtgttgataacttcaatatcgtcagccgggttaactttgccggaaacgtgaatgatgttgtcattttcaaagcagcgaacaacgtgaccgatcgcttcggtttcacggatgttggtcaggaactggttacccagaccttcgcctttcgatgcgccttttaccagaccggcgatatcgacaaattccatggtcgtgggaagcgtacgctgcggttttacgatttcagccagttgatccaggcgaggatcaggcattggtacgacgcctgtgttcggctcaatggtgcagaatggaaagttggccgcttcaataccggctttggtcagcgcgttgaacagggtagatttcccgacgttgggcaaaccgacgataccgcatttgaatcccatgatttaaatcaccttaatatcttaataatcaacctgttattgctaacagattgcagaaatggaaataactttgcctattatacacggcactcggcaaaaatgccgcagacaacgacttattgcgctttaaaggcgtgcaatcggttcgttgctttggtcaagccatctgtaaaccacatttcagtacaacgcgccgcttcgtcaatggcttcatcaattaacttctgttcactaacaggcggtttgcctaacacaaaaccgacaactttatttttatcgcccggatgaccgattccgatgcgtaaacggtgaaagttagggttattacccaatttactgatgatgtctttcagtccattgtgaccaccatggccaccgcccaatttaaatttggcgacgccaggaggcagatccagttcgtcgtgggccaccagaatttcgtccggattaatgcggaaaaaactggccatcgccgcaacggctttgccgctgagattcataaatgtagtcgggactaacaggcggacatcttcgcctccaagagtgactcgcgaagtataaccaaagaatttagcctcttcgcgcagcggagcgcgcaaacgctctgccagtaagtcaacgaaccaggcaccagcattatgtcgcgttgcggcgtattcagcaccggggttcgccaggccgacaatcaatttaatcgtcacgtttttttgtcctgagtgtgtacataactggcgcgtagtttactggttgcggccccgcttgacaaaaaactgcgtatcaaatgcagataacgtaataattgcctgagtggactattagaaagtcaaggtgttcaggcgtttatttgtaaagttttgttgaaataagggttgtaattgtgatcacgcccgcacataacccactgggtgttgtctatactttacacataaggaagaggggtattccctgttacaacccagaaagttccggaggtgacatatgaaacgcaaaaacgcttcgttactcggtaacgtgctcatggggttgggtctggtggtaatggtggtcggcgtggggtattcaatcctcaaccagttaccacagtttaatatgccccagtatttcgcacatggtgcagtgctaagtattttcgtcggtgccattctctggctggcgggtgcccgtgttggcgggcatgaacaggtgtgcgaccgttactggtgggttcgccactatgacaaacgttgccgccgtagcgataatcgccgtcatagctaacaaataatgcagtttgctgaccagtcagtttgcgctgactggtcaatctcgtacttataaatccgccatcgccgcgcgacgattcgggaagaacgccaggcgtcccgggatcggttgaatgccagcgcgagccatagtgcgcagtggctggaattccacgttgcacacgcgcagttcacatccctcgggcagacgcttcacaaaacgctggaacgcatcaagaccaccagcatcaagtaccggaacggcatcccacttcagaatcacaatccgtttgccttcaagacgtgactccaggtccgtgaataagccttcagcagcagcaaaaaacagcgggccaataacgcgcagaaccaggacatcgtctggaacatctacgactaccggtgccaggcgagtcatacgtgcgatacgacgcataaacagcagcgatgccagcacgatccccacgctgatggcaataaccatatcaaacaacacggtcagcgacatgcacagcagcatgacgatgatgtcatctttcggcgcatgacgcagcaagtcgaccactttgtgcgcttcactcatgttccacgccaccatcaacagcagggctgccatggcggaaagcggcagccaggagagcagcggtgccagtaccagcagggcaagaataaccagaatagagtggatcaccgccgagataggggacgttgccccggcacggacgttagcggcagaacgcgcgatggcagctgtagcggtaataccaccaaagaacggagcgataatattccccagtccctgtccaaccagttcgctgttcgccttgtgtttcgtcccggtcataccatccagcaccacggcgcagagcagagattcgattgcgccgagcattgccattgagaatgccgcaggcagcagtgtgcgaatagaatcccaggttagcgtgaattctgaattaggcagatcccacggcagcaccagttgcggcagcagttgcggaataccgttaccctgagaaccatcggccaggacgtagtggaattgcgaaccgatggtagcaacatgtccgccgagcaggttaacaatccccatcaccgcgcaaccagccagcaaggccggaaggtgaccgggtaaacgaatgcccagacgcggccaaaaaacaagaatacctagcgtcacaatgccaatggcagcatcacccacattaatggtcggcagcgccataaataatgcgccgactttttgtagataatgttccgggacatgggccatttgcagaccgagaaaatctttaatctgcatggtaccgatggtgatcccgatacccgaggtgaaacctaaggtgacggaaaccggaatatactcaatcaggcgaccaaagcgtgccagacccatcagaatcaaaaagatccccgacagcaaggtcgcaaccagcagtcctgccagtccaaactgttgcgacacgggatagagaattaccacaaatgccgcagtcggaccggaaacgctaaagcgtgacccacccgtcagagcaatgacaatccccgcaacagctgcggtatataaaccgtactggggtgccacaccactaccaatagccaacgccatcgccagcgggatagcaataatcccgacggttatcccggcaatcaggtcacgggtaaaccgtgcggcagtatatttttctttccagcaagcgtcgatcagagcgcggaaaggcatcacatgtgaggaaaatattttgttcacaataatgtttcatccgtgagcgcatcatctgtcaactaaatggcaggtgaaggaggcataggtcatacaaatggatattacagacaaaaaaacccgccgcagcgggtctttgagccgggttcgattagtgttcgaacatggcagagatcgattcttcgttgctgatacgacgaatcgcttcggccagcatacctgacagggtcagagtacgcacgttcggcagtgatttgatttcatcgctcagcggaatggtatcgcagacaacgacttcatcaattacagagttacgcaggttgttcgccgcgttgccagagaagatcgggtgagtcgcgtacgcaaatacacgtttagcaccacgttctttcagagcttcagcagctttacacagcgtaccgccagtgtcgatcatatcatcgaccagtacgcagtcacgacctgcaacgtcaccgatgatatgcatcacctgtgaaacgttcgcacgcggacgacgtttgtcgatgattgccatatcggtatcgttcagcagcttagcgatagcgcgggcacgcacaacgccgccgatgtccggagaaaccacaattgggttatccagattcagctgcagcatgtcttccagcaggatcgggctaccaaatacgttatcaaccggaacgtcgaagaaaccctgaatctgttcagcgtgcagatccactgtcagcacacggtcaacaccgacgctggagaggaagtctgcaaccactttcgcagtgattggtacacgagcggaacggacgcgacggtcctggcgcgcatagccaaagtaggggataacagcggtgatacgacctgcggaagcacgacgcagggcatcaaccataacgactaattccatcaggttgtcgttagtaggggcacaagtggactggatgatgaaaatatcaccaccgcgtacattttcattaatttgtacgctgacttcgccatcgctaaagcgacctacagcggcgtcgccgagtgaagtgtacaggcggttggcaatacgttgtgctagttccggggtggcgttaccagcaaaaagcttcatatcaggcacgagaagaacctcaggcatgcgtccattggtggaaagaatctgccgaaaactgtgcgggccaggcatgatcctttccaggcggtgtattaaagagcgcgatgcaacgtctggaacaaggtgacgttgtcaccgaaactcagcttgcccggcttaaagcatggctctgtgcaatggggaaagattagcgcctttcgccacaaagccattgagccattccggggcttgctctagcacctggcgggcttcagactctgtatcaaattcagcaaagacacaggcccctgtcccagtcaggcgcgacggggcgtattctaacagccaggaaagcaccgcatcaacctcgcgaaaacgttttcttgcgataacctcgcaatcattgctgaattcacattttagcaacgtttctattgacctttttggcgtattgcgcgggagttcaggatctttaaaaatcaccggagtcggaatacttacaccagggtgcgccaccagataccacttctctggcggatccaccggcgttagtatttcaccaacgccttcggcaaacgcggcatgcccccgaacaaagacaggaacatctgcgcccagcgtcagccccatttccgccagctcatccatgcttagcccgcattgccagagatgatttaatgccaccaggaccgtcgcggcattggatgaaccaccgccgagaccgccgcccatcggcaaacgcttgtcaatgctgatattcgcaccgcttcccgtcggaagacgcccgctgtctgccgcagttttcatcaacaatcgcgctgcgcgaacgatcaggttatcttcatgttccacgccttcaacgggcgttaacagacgaatatccccatcgtcacgaagctcaatgctgatggtgtcgccgtaatcaagaaactgaaacagcgtttgcagcgtgtggtaaccatccgcacgctgaccggtaatgtataaaaacagattaagttttgccggagagggccactgtgtccgcattatttcactatccagttatccatttttaacttgatgcgttgaccaccgtcggtgagttccatattggctggcatcgcaggttgcgttttggtgtcataaccaccataaacaaccttccagtttttgccattctggctgtaggtaatttcgctcaggcggtactggtcgtccagtttgtagtcggttgcatcacccggtaaacctaaaatccactggcgcaagctgttgagcggaattggcattccggtcaatttgccaatcatctcttcggcgtcatcggcggtataacgctgacctttattgtcgactaactgcacgttacccggttgagcattcagctccagttccgtgctgcccaatgggttagtgagcagcagacggtagcgatcctggccggtttgctgccagaaaaagcgggcgtacactttttgttggtcagaaatataagcgaacgcgccgcgagtctgatactgattaagattgcgcacgtcttgctgatgctgacgccattgtggcgaatccgggcttttgccaggacctttgggcgtggtaacggaacaggcagtgagcacaagagcagccagcggtagcaggcggataagacgaaaatcgggcaggggcatagtgatgacaagtccttgagatacgttgcagttataacccttaatgctagcgttaccgtccgctatcgtctatgttcaagttgtcttaattgccagaatctaacggctttcggcaattactccaaaagggggcgctctcttttattgatcttacgcatcctgtatgatgcaagcagactaaccctatcaacgttggtattatttcccgcagacatgacccttttagcactcggtatcaaccataaaacggcacctgtatcgctgcgagaacgtgtatcgttttcgccggataagctcgatcaggcgcttgacagcctgcttgcgcagccgatggtgcagggcggcgtggtgctgtcgacgtgcaaccgcacggaactttatcttagcgttgaagagcaggacaacctgcaagaggcgttaatccgctggctttgcgattatcacaatcttaatgaagaagatctgcgtaaaagcctctactggcatcaggataacgacgcggttagccatttaatgcgtgttgccagcggcctggattcactggttctgggggagccgcagatcctcggtcaggttaaaaaagcgtttgccgattcgcaaaaaggtcatatgaaggccagcgaactggaacgcatgttccagaaatctttctctgtcgcgaaacgcgttcgcactgaaacagatatcggtgccagcgctgtgtctgtcgcttttgcggcttgtacgctggcgcggcagatctttgaatcgctctctacggtcacagtgttgctggtaggcgcgggcgaaactatcgagctggtggcgcgtcatctgcgcgaacacaaagtacagaagatgattatcgccaaccgcactcgcgaacgtgcccaaattctggcagatgaagtcggcgcggaagtgattgccctgagtgatatcgacgaacgtctgcgcgaagccgatatcatcatcagttccaccgccagcccgttaccgattatcgggaaaggaatggtggagcgcgcattaaaaagccgtcgcaaccaaccaatgctgttggtggatattgccgttccgcgcgatgttgagccggaagttggcaaactggcgaatgcttatctttatagcgttgatgatctgcaaagcatcatttcgcacaacctggcgcagcgtaaagccgcagcggttgaggcggaaactattgtcgctcaggaaaccagcgaatttatggcgtggctgcgagcacaaagcgccagcgaaaccattcgcgagtatcgcagccaggcagagcaagttcgcgatgagttaaccgccaaagcgttagcggcccttgagcagggcggcgacgcgcaagccattatgcaggatctggcatggaaactgactaaccgcttgatccatgcgccaacgaaatcacttcaacaggccgcccgtgacggggataacgaacgcctgaatattctgcgcgacagcctcgggctggagtagcagtacatcattttctttttttacagggtgcatttacgcctatgaagccttctatcgttgccaaactggaagccctgcatgaacgccatgaagaagttcaggcgttgctgggtgacgcgcaaactatcgccgaccaggaacgttttcgcgcattatcacgcgaatatgcgcagttaagtgatgtttcgcgctgttttaccgactggcaacaggttcaggaagatatcgaaaccgcacagatgatgctcgatgatcctgaaatgcgtgagatggcgcaggatgaactgcgcgaagctaaagaaaaaagcgagcaactggaacagcaattacaggttctgttactgccaaaagatcctgatgacgaacgtaacgccttcctcgaagtccgagccggaaccggcggcgacgaagcggcgctgttcgcgggcgatctgttccgtatgtacagccgttatgccgaagcccgccgctggcgggtagaaatcatgagcgccagcgagggtgaacatggtggttataaagagatcatcgccaaaattagcggtgatggtgtgtatggtcgtctgaaatttgaatccggcggtcatcgcgtgcaacgtgttcctgctacggaatcgcagggtcgtattcatacttctgcttgtaccgttgcggtaatgccagaactgcctgacgcagaactgccggacatcaacccagcagatttacgcattgatactttccgctcgtcaggggcgggtggtcagcacgttaacaccaccgattcggcaattcgtattactcacttgccgaccgggattgttgttgaatgtcaggacgaacgttcacaacataaaaacaaagctaaagcactttctgttctcggtgctcgcatccacgctgctgaaatggcaaaacgccaacaggccgaagcgtctacccgtcgtaacctgctggggagtggcgatcgcagcgaccgtaaccgtacttacaacttcccgcaggggcgcgttaccgatcaccgcatcaacctgacgctctaccgcctggatgaagtgatggaaggtaagctggatatgctgattgaaccgattatccaggaacatcaggccgaccaactggcggcgttgtccgagcaggaataatggaatatcaacactggttacgtgaagcaataagccaacttcaggcgagcgaaagcccgcggcgtgatgctgaaatcctgctggagcatgttaccggcagagggcgtacttttattctcgcctttgatgaaacgcagctgactgacgaacaatgtcagcaacttgatgcgctactgacacgtcgtcgcgatggtgaacccattgctcatttaaccggggtgcgagaattctggtcgttgccgttatttgtttcgccagcgaccttaattccgcgcccggatacggagtgtctggtggagcaggcactggcgcggttgcctgaacaaccttgccgtattctcgatctcgggacgggtaccggggcgattgcgcttgcgctggctagcgagcgcccggactgcgaaattatcgctgtagatcgtatgcctgatgctgtctccctggcacaacgtaatgcccagcatctggcgatcaaaaatatccacattctgcaaagcgactggtttagcgcgctagccgggcagcagtttgcgatgattgtcagcaatccgccgtatattgacgagcaggaccctcatcttcaacaaggcgatgtccgctttgagccgctcactgcgctggttgcggcagacagtggaatggcagacatcgtgcatatcatcgaacagtcgcgtaacgcgctggtatccggcggctttctgcttctggaacatggctggcagcagggcgaagcggtgcgacaagcatttatcctcgcggggtatcatgacgtcgaaacctgccgtgactatggtgataacgagcgcgtaacgctcggccgctattatcaatgacaagtttttctacactgcttagtgttcatcttattagtatcgcgctttctgttgggctattaaccttacgtttctggctacgttatcagaagcatccacaggcatttgctcgctggacgcgcattgtgccgccggttgtcgatacgctgttactgttaagcggcattgcgttgatggctaaagcgcacatcctgccattttccgggcaggcacagtggctgactgaaaagctgtttggagttatcatttatatcgttttgggttttattgcactcgattatcgtcgtatgcacagtcagcaggcgcgcattattgccttcccgctggcgttggtggtgctgtacatcatcattaaactcgccaccacaaaagtaccgttactggggtaagtcatgagatcgttagctgatttcgaatttaataaagcgccattgtgcgaaggcatgatcctggcttgcgaagcaatccgccgcgattttccctcgcaagatgtttacgacgaactggagcgtctcgttagtctggcgaaggaagaaatcagccagcttctgcctttagaagagcagttggaaaaactgatcgcgctgttttacggcgactggggatttaaagcctcacgcggtgtttatcgtctttccgatgcattatggctggaccaggtgttaaagaatcgacagggcagtgcggtatcattaggtgcggttttattatgggtcgcgaatcgtctcgatttgccgctgctgccggtgattttccctacgcagctgatattgcgcattgaatgtccggatggcgaaatttggctgattaatccttttaacggtgaatcgttaagcgaacatatgctggacgtatggttaaagggaaatatcagcccgtcggcggaactgttttatgaagaccttgatgaagctgataacattgaggtaatccgcaaattgctggatacactcaaagcctcgttgatggaagaaaatcagatggagctggcgttacgcaccagcgaagctttattacaattcaaccctgaagatccctatgaaattcgcgatcgcgggttgatttatgcgcaactggattgcgaacacgttgcgttgaacgatttaagttatttcgttgaacagtgtccggaagacccgatcagcgaaatgatccgtgcgcaaataaataacatcgcgcataaacatattgtgctgcattaattaatcgacattttactcaagattaaggcgatcctatgaaacaaaaagtggttagcattggcgacatcaacgtagcaaatgacctgccgttcgtactgtttggcggtatgaacgtgttggaatctcgcgatctggcgatgcgcatttgcgagcactacgtaactgtgacccagaaactgggtatcccttacgtgttcaaagcctcttttgacaaagccaaccgctcctccatccactcttatcgtggaccgggcctggaagaagggatgaaaatcttccaggagttgaagcagacttttggcgtgaaaattatcaccgacgttcacgaaccaagtcaggcacagcccgttgctgatgtcgtggatgtgattcagttgccggcgtttcttgctcgccagactgacctggttgaagccatggcgaaaaccggtgcggtaattaacgtcaagaaaccacagtttgtcagcccgggacagatgggtaatatcgttgataaattcaaagaaggcggcaacgaaaaagtgattctttgcgatcgcggtgctaacttcggctatgacaacctggttgtcgatatgctgggcttcagcattatgaagaaagtgtctggtaactcgccggtgattttcgacgtgacccacgcactgcaatgccgcgatccgtttggcgcagcttccggtggtcgtcgtgctcaggtggctgagctggcacgagccggtatggcggtaggtctggcggggctgtttattgaagcgcatccggatccggaacatgcgaaatgtgatggtccatccgcgctgccgctggctaaactggaaccgttcctcaagcagatgaaagcgattgatgatctggtgaaaggtttcgaagaactggataccagcaagtaatcttttttgcttgaaaaataaagtattagcgttctgcgttaagacttttttcatgggtgccggatacaaaaaaggccgcaggctgttacccctgcggccggtttcgggcgcatattgccatcacggcagcctgacgcccgttttcaccttacttccggttacgccaccagctgacaatcgctgcggtaataattcccgccaggatcggtgctgccaggtcgtgccagaaaatcatggcaaactgcgcgagcgtcatatagccgccttgttgtaatgacaacattttgcggctattcttgaattgttctggttcaagattagcccccgttctgttgtcaggttgtacctctcaacgtgcgggggttttctctttccagcaaccaatgccaccagggataaagcccccgcaacattgcgcctcaccggataacgccggcttggtgtggatactacgactcaattcatcttcacttcatccctgaaatgtttgcaatgaagagtgcattccggtttttcaacagctgttacagtcatttcatgagtgctctggatgaggcttccagctcgggttgccaatatttacttgtggaagtgataaagacaaaaatggccgcaggctgttacccctgcggccggtttcgggcgcatattgccatcacggcagcctgacgcccgttttcaccttacttccggttacgccaccagctgacaatcgctgcggtaataattcccgccaggatcggtgccgccaggtcgtgccagaaagtcatggcaaactgcgcgagcgtcatatagccgccttgttgtaatgacaacattttgcggctattcttgaagtgtctggtttcaagattagcccccgttctgttgtcaggttttacctctcaacgtgcgggggttttctctttccagcaaccaatgccaccagggataaagcccccgcaacattgcgcctcaccggataattccggcttggtgtggatactacgtcgcaattcatcttcacttcatccctgaaatgtttgcaatgaagagtacattccggcttttcaacagctgttgcagtggtttcgtgcagggtgaggtacaggctcgcaattctgattaacgacctgtccaggtagtatgaagaaatacaataagcaggaatttatattatctcccccgattaccgtcatcggaggagatataactgtcaggcaaatatcgtcatcaaataggcggcaaacagtgccagatgcgctgcgccattgagcacgttagtacgtccggtggagaaggagatatggcacagcactaaagaggccaccatcaccaccatttctggcgcaccaagtgcaaactgcaattcgttacccgtcataaaggcaattagcgtgacgacaggtacggtaagcgaaatggttgctaacactgaaccaaagaacagattcatcgcgcgctgaacctggttgttcaacactgcttttaatgcacctaaaccttccggcgacagaatcaacagtgccaccaggaagccagtaaaggcgacaggggcattcatgctgtcgagcaatgtctccagcgagctggcgttcattttggtcaccgcaataacggcaatcagatggataatcaaccagatagcatgccacaggctgctatgggcagacggtttaccgtgatgcgggtcgtcatcatcactgtcatcttcgtgctcgtagacaaacaaactttgatgcgttttggtctggatcagcaaaaatacgccatacattgccgcagaaattaatgctaccagtaacgcctgaccggttgaaaaattcgccgcaggcagagccattggaaataccagtacgattatcgccagggggaacagcgcaattaaatactgcttgataccaaacagattcatatattgggtggcaaacttacgaccgcccaacaataatgaaaagccaaccagcccaccggtaacaatcataatgattgaatagagcgtatcacgcattagcgttggcgcggcgtcgccggttgccattaaagctgaaatcaaactgacttcaagaataaccactgaaaggctaagaataagcgaaccgtaaggttctcccaggcgatgggctaatacgtccgcatgacggacaacactaaaggcgctacttaaaataccaataagcgcaagaagattgatggcaatgaccactggtagtgtctggctgcttccccacaggaacagcactaccagcgccagaaccgggaaaataagcgaagtctccttgtggcgggtttttaccgcctcttgagcatttgacattatggttatccctttgcagatgaatttatcgaaaatgtaaaaaataggtaggaaaaataacagaaagtgtctggatatcggtaacattttacgaatttttaccccgctgtcgattttttactcattggggcataaaaataagtattacgtttagacaatgtttgttttagcgtttcttaagaagagtctgacctgaaaattcttatgttttggcaagagtagatattgttgaccacacttaatgttcaactttgtaaaaggagtcaacgatgccgtataaaacgaaaagcgatctgccggaaagcgtaaagcacgttctaccgtctcatgcccaggatatctataaagaagcgttcaacagcgcatgggatcaatataaagataaagaagatcggcgtgatgacgccagtcgcgaagaaaccgcgcataaagtggcctgggctgctgtgaagcatgaatatgccaaaggggatgatgataaatggcataaaaaatcgtaaaaccggtcgcttagttaaagctattcgtgcggtgttgccttgcaagtggtccgtggattgcatattgtcccgttagtggtttcaaaatgagcagtaaaaatgtccggaagacaccaaaaagttgtcgcagggaagtatgcagtggcggaggtgtaaggtgataacgcgtgatttcttgatgaatgccgattgtaaaacggcatttggtgccattgaagaatcactcttatggtcagcagaacaacgggcggcttcgctggcggcgacgctggcttgtcgacctgatgagggaccggtgtggatcttcggctatggatcgttgatgtggaatccggcactggagtttaccgaatcgtgcaccggtacactggttggatggcatcgcgcattttgcctgcgcctgaccgccgggcgcgggactgcgcaccagccgggacggatgcttgcactgaaagagggcggacgcaccacaggcgtcgcctatcgactgccagaagagacgctggagcaggaactaaccctgttgtggaagcgagagatgattaccggctgttatctgccaacctggtgtcagcttgatcttgatgatggacgcacagtaaacgccattgtgtttattatggacccgcgacatccagaatatgaatctgatactcgcgctcaggtcatcgcgccgttgattgcggcggcgagcggtccgctgggaaccaacgcacaatacctgttttcactggaacaggagcttatcaaactgggaatgcaggacgatgggctgaatgatttgctggtatcggtaaaaaaactgctggcggagaattttccggatggtgtgttacgtccgggattcgcctgagtaaacttcccgcatagtggggcgtcagacgccccctcaaacattaaaatgtgagcactttatcggctgacagcgtccattgcgccagttccacaagagtaccgatttccaccccatcaatcagaggaagtgtactaatcccgcgcccgtcggtacaggttttgcacaatttcaccggtacattctgagcggtaaggatctccagcatttgctgaatgttgtagccttcccctggtttttgcccgcgcaacccggctgtgaccgcatcagacatgaggaacagacgcagatccagattgctctcctgctctcgtaacgcaatggccagccgcaagctgttaaacaaggattcgctcccgtaaggtgcgccattggcaacgatcacgattttttgcattatttactcctgtattcagggaattagacactcatcttctatcttactgcttctgcagcgtctgaccaatcggtcacatttttaaggattttcctgaaagcgcgagaaaatacgacaaaagttgccagtaatcgttattctttaaggctatggtttttcattattaccggaagttaccgacgttttgagccgtttcgttcctcgcattatcccgttttatttactcttgcttgtagcaggcggtacagctaacgcacaatctaccttcgagcaaaaagcggcaaatccctttgataataacaatgatggtctgccggatttaggcatggctcccgaaaatcatgatggggaaaaacactttgctgaaattgtgaaagatttcggcgaaaccagtatgaatgataacgggctggatactggcgagcaggcaaaagctttcgcattgggaaaagtccgcgacgcgcttagtcaacaggttaatcagcacgtagagtcctggctatcaccgtggggaaatgccagtgttgacgtcaaagtggataacgaaggacatttcaccggcagtcgtggaagctggtttgtgccgttacaagataatgatcgttatctcacctggagccagcttggtcttactcagcaggataatgggttggtgagcaatgtgggcgttgggcaacgctgggcgcgcggcaactggctggtgggttataacactttttatgacaacttgctggacgaaaatcttcagcgagcgggctttggtgccgaagcgtggggcgaatatttgcgattatcggcaaacttttatcagccgtttgctgcatggcatgaacagacagccacgcaggaacaacggatggcgcgcgggtacgacctgacagctcggatgcgcatgccgttctatcaacacctcaataccagtgtcagcctagaacagtattttggtgatcgtgttgatttgtttaactctggtacgggttatcacaatcccgtcgcgttgagtctgggattaaattacacccctgtgccattagtcactgtgacggcccagcataaacagggtgaaagtggcgaaaatcaaaataacctcgggctgaatcttaattaccgctttggtgtaccgctcaaaaaacaactttctgcgggcgaggttgccgaaagtcagtcgttacgtggtagtcgctatgacaatccgcagcgaaataatctaccgactcttgagtaccgacagcgaaaaacgttaacggtgtttctggcgacaccgccgtgggatctaaaacctggcgaaacagtgccgctgaaattacaaatccgcagtcgttacggtattcggcaactgatttggcagggcgatacgcagatattaagtttgacgccgggcgcacaagccaacagcgcggagggctggacgctgatcatgcctgactggcagaacggggaaggggcaagcaatcactggcgattgtctgtggtggtggaagataaccaggggcagcgtgtctcctccaatgagatcacgctaacgcttgtcgaaccgttcgatgcattgtcaaacgacgaactgcgctgggaaccgtaatcagaaaatgcgctcctgatgcacccataccgctgcttccacgcgagacttgagcttcattttcttcagcatgtgcttgacgtgcacttttactgtgctttcggtgatatccaggcggcgggcaatcatcttgttcggcaaaccctgggcaatcagcttgagaatatcgcgctcgcgtggggttaactggttaacatcgcgctcagtagtggcacggttagcgcgcaagctggcggccagaacaggcgttaatgcttcgcttaataccatttcgccagcagctgcctgatgcaatgctttcagcagatcttccggttccatatcttttaacagatagccatccgcgccgcgtttcagtgcggtgaccacatcttcttcatggttagagacgctgaataccacaatgcgccctgagagggacttttcgcgcagtttatccagcgtttccagaccgttcatgccgggcatattgagatctaacaggatcagatcgggatcaagagactccgccagttcaataccctgttcgccattactcgcttcgccaaccacggtgatatctggtgccatactgataagctgttttacgccagttcgcagcatcgggtgatcgtcaatcagcaggatagtagccggttcctgattactcatgggtatctccttggacgtctgtgaaagttttttcgggaataaaggtgaccaccacttcggtgccacctgattcacgacggcggacgcggcaatcgcctcgtaaactttgcgcacgatcgcgcattattatcatgccgtagtgattgctgcggatggcattttcaggcacgccgcagccgttatcctggacggtcagtttgacctgattatcgttttgcgccaccgtcaccacgacttcactcgcttgcgaatgtttgagggcgttacttaatgcctcacgggcaatttgcaacaagtggattgcctgatgcgaaggcaccaggcgaggcggcaattgataatccagcttcaccgggaagccaaatttggcgctgtactcttcgcaactcgcctccagcgccggacgtaatccaggctcggtgagctgcaagcggaatgtggtgagcaattcacgcaactgcgcccaggatgcattcagttcgttacggatctgacttaacagttcgcggctgctttctggcagcgcatcgccctgcatctgtaaacaactcacctgcatcttcatgcaagagagagattgggcaatagaatcatgcagttcgcgcgcaatggtggcacgctcttccatcacgatcaactgttgctgacgttcctgatggcgatccagcgccagcgtggcggtgagttgttcaaccagggtatccaccagttgttgttgatcatggctaagatgacgcccctgcggcagggtcgccagcaaaataccgtactgcgtatgagagtcagccagccgccacttcagggtcgtgccgcgatcaccaacgggtaatacgccgcgcgggcagagctggcagcctttatcatcacaagtcatatctggctggcaggtaaactcctgatgattctcttcatcatcagtgtcatacacccgcaattcgatatcacgtagcagggttaaattctgtaagccgttgagtacaggtgacaggcgttcacacagcggggcgcgggaatgcaaacggcggttagcctgccataaaaaagagaggatctgatttttatgctccagcccggcggttttctcctgaacccgctgctcaagtacggcataactttcggccagttctgcagacatattgttcaacgcagttccaagcatcgccatttcgttgcgcccgctgatgtttgcgcgttgggtaaaatcgcgatgactgacggcactcgccattgccagcagttgccgccacggttgtagcagtcgcgcccgcaaccagataatagtgaacaccagtaaaagtgccataaataccgccattacccgatggaccagtaccactgtctcgatgcgcatttccgtggtgcggtcaaaaccagataccagttgatcaagcccggcaacaaactggctgacatccgctgacaccgtttctcggttttgtgcacgcatcagcgcagggatcagttcattacgccagtaatcttgtaaaccctgtaattgcgccagttgtccgtctcgttctgctgctcgagtcaactcggcgctaaatgccgtttgttccatctctttaattaagggcttgtctttctcgcttaatggcactgccgccaacagacggtaactttgcatgcgcagcgatcccgctttgttgatcgcatgggcgctgccctgaacgccttgcaccagccagccagaaaccgccatccctgccagtccaatagcagtagaaagcaacacaataagcgcaacctgattaaccagggtgagcggagagagacaacgtttaagcatgtaaacctcttccttcaggctttaaatgagcaataaccttaatgaatgtgacgatacattctggaatggcagtattctcggctattggctgaagtatacccatacccggaaagagttactccttatttgccgtgtggttagtcgctttacatcggtaagggtagggattttacagcaccgtgaaaaatctcataatttttatgaagtcactgtactcactatgggtaatgataaatatcaatgatagataaagttatcttatcgtttgatttacatcaaattgcctttagctacagacactaaggtggcagacatcgaaacgagtatcagaggtgtctatgagtcactcatccgcccccgaaagggctactggagctgtcattacagattggcgaccggaagatcctgcgttctggcaacaacgcggtcaacgtattgccagccgcaacctgtggatttccgttccctgtctgctgctggcgttttgcgtatggatgttgttcagcgctgttgcggtgaacctaccgaaagtcggctttaattttacgaccgatcagctatttatgttgactgcgctgccttcggtttctggcgcgttattacgtgttccatactcctttatggttcctatcttcggtggtcgtcgctggacggcgttcagcaccggtattctgattattccttgcgtctggctgggttttgccgtgcaggatacctccacgccttatagcgtcttcatcatcatctctctgctatgcggctttgctggcgcgaacttcgcatccagtatggcaaacatcagcttcttctttccgaaacagaagcagggtggcgcgctgggtctgaatggtggtctgggaaacatgggcgtcagcgtcatgcagttggttgctccgctggtggtatcactgtcgattttcgcagtatttggtagccagggcgtcaaacagccggatgggactgagctgtatctggcgaatgcgtcctggatatgggtgccgttccttgccatcttcaccattgcggcgtggtttggcatgaacgatcttgctacctcgaaagcctccatcaaggagcagttgccggtactcaaacggggtcatctgtggattatgagcctgctgtatctggcaaccttcggctccttcatcggcttctccgcgggctttgcaatgctgtcaaaaacgcagttcccggatgttcagattctgcaatacgctttcttcgggccgtttattggtgcgctggcgcgttctgcaggtggtgcattatctgaccgtctgggcggaactcgtgtcacgctggtgaactttattctgatggcgattttcagcggcctgctgttcctgaccttaccgactgacgggcagggcggaagcttcatggcgttcttcgcggtcttcctggcgctgttcctgacagctgggctgggtagtggttccactttccagatgatttcagtgatcttccgtaaactgacaatggatcgcgtgaaagcagaagggggttctgacgaacgtgcgatgcgtgaagcggcaaccgacacggcggcggcgctgggtttcatctctgcgattggcgcgattggtggcttctttatcccgaaagcgtttggtagctcgctggcattaacgggttcgccagtcggcgcaatgaaggtatttttgattttctatatcgcctgcgtagtgattacctgggcggtatatggtcggcattctaaaaaataaaccgttactcgtcatacttcgggttacatgtgctgcggctgcgttcattcaccccagtcacttactttagtaagctcctgggattcattcacttgccgccttcctgtaaaccgaattatatagagtaaaatatttgattatcctttgcgcggcatgatgtcgcgctttttttatgcgtcatttagttacaacatactaatgttatatggtttatttcgccggatttcattaagagccattaatatgttacccatggggaatactccttaatacccatctgcataaaaatcttaatagtttaaataactacaggtataaaacgtcttaatttacagtctgttatgtggtggctgttaattatcctaaaggggtatcttaggaatttactttatttttcatccccatcactcttgatcgttatcaattcccacgctgtttcagagcgttaccttgcccttaaacattagcaatgtcgatttatcagagggccgacaggctcccacaggagaaaaccgatgagtaaattcctggaccggtttcgctacttcaaacagaagggtgaaacctttgccgatgggcatggccagcttctcaataccaaccgtgactgggaggatggatatcgccagcgttggcagcatgacaaaatcgtccgctctacccacggggtaaactgcaccggctcctgcagctggaaaatctacgtcaaaaacggtctggtcacctgggaaacccagcagactgactatccgcgtacccgtccggatctgccaaaccatgaacctcgcggctgcccgcgcggtgccagctactcctggtatctttacagtgccaaccgcctgaaatacccgatgatgcgcaaacgcctgatgaaaatgtggcgtgaagcgaaggcgctgcatagcgatccggttgaggcatgggcttctatcattgaagacgccgataaagcgaaaagctttaagcaggcgcgtggacgcggtggatttgttcgttcttcctggcaggaggtgaacgaactgatcgccgcatctaacgtttacaccatcaaaaactacggcccggaccgtgttgctggtttctcgccaattccggcaatgtcgatggtttcttacgcatcgggtgcacgctatctctcgctgattggcggtacttgcttaagcttctacgactggtactgcgacttgcctcctgcgtctccgcaaacctggggcgagcaaactgacgtaccggaatctgctgactggtacaactccagctacatcatcgcctgggggtcaaacgtgccgcagacgcgtaccccggatgctcacttctttactgaagtgcgttacaaagggaccaaaactgttgccgtcacaccagactacgctgaaatcgccaaactgtgcgatctgtggctggcaccgaaacagggcaccgatgcggcaatggcgctggcgatgggccacgtaatgctgcgtgaattccacctcgacaacccaagccagtatttcaccgactatgtgcgtcgctacaccgacatgccgatgctggtgatgctggaagaacgcgacggttactacgctgcaggtcgtatgctgcgcgctgctgatctggttgatgcgctgggccaggaaaacaatccggaatggaaaactgtcgcctttaataccaatggcgaaatggttgcgccgaacggttctattggcttccgctggggcgagaagggcaaatggaatcttgagcagcgcgacggcaaaactggcgaagaaaccgagctgcaactgagcctgctgggtagccaggatgagatcgctgaggtaggcttcccgtactttggtggcgacggcacggaacacttcaacaaagtggaactggaaaacgtgctgctgcacaaactgccggtgaaacgcctgcaactggctgatggcagcaccgccctggtgaccaccgtttatgatctgacgctggcaaactacggtctggaacgtggcctgaacgacgttaactgtgcaaccagctatgacgatgtgaaagcttataccccggcctgggccgagcagattaccggcgtttctcgcagccagattattcgcatcgcccgtgaatttgccgataacgctgataaaacgcacggtcgttcgatgattatcgtcggtgcggggctgaaccactggtatcacctcgatatgaactatcgtggtctgatcaacatgctgattttctgcggctgtgtcggtcagagcgggggcggctgggcgcactatgtaggtcaggaaaaactgcgtccgcaaaccggctggcagccgctggcgtttgcccttgactggcagcgtccggcgcgtcacatgaacagcacttcttatttctataaccactccagccagtggcgttatgaaaccgtcacggcggaagagttgctgtcaccgatggcggacaaatcccgctataccggacacttgatcgactttaacgtccgtgcggaacgcatgggctggctgccgtctgcaccgcagttaggcactaacccgctgactatcgctggcgaagcggaaaaagccgggatgaatccggtggactatacggtgaaatccctgaaagagggttccatccgttttgcggcagaacaaccagaaaacggtaaaaaccacccgcgcaacctgttcatctggcgttctaacctgctcggttcttccggtaaaggtcatgagtttatgctcaagtacctgctggggacggagcacggtatccagggtaaagatctggggcaacagggcggcgtgaagccggaagaagtggactggcaggacaatggtctggaaggcaagctggatctggtggttacgctggacttccgtctgtcgagcacctgtctctattccgacatcattttgccgacggcgacctggtacgaaaaagacgacatgaatacttcggatatgcatccgtttattcacccgctgtctgcggcggtcgatccggcctgggaagcgaaaagcgactgggaaatctacaaagccatcgcgaagaaattctccgaagtgtgcgtcggccatctgggtaaagaaaccgacatcgtcacgctgcctatccagcatgactctgccgctgaactggcgcagccgctggatgtgaaagactggaaaaaaggcgagtgcgacctgatcccaggtaaaaccgcgccacacattatggtcgtagagcgcgattatccggcgacttacgaacgctttacctctatcggcccgctgatggagaaaatcggtaatggcggtaaagggattgcctggaacacccagagcgagatggatctgctgcgtaagctcaactacaccaaagcggaaggtccggcgaaaggccagccgatgctgaacaccgcaattgatgcggcagagatgatcctgacactggcaccggaaaccaacggtcaggtagccgtgaaagcctgggctgccctgagcgaatttaccggtcgtgaccatacgcatctggcgctgaataaagaagacgagaagatccgcttccgcgatattcaggcacagccgcgcaaaattatctccagcccgacctggtctggtctggaagatgaacacgtttcttacaacgccggttacaccaacgttcacgagctgatcccatggcgtacgctctctggtcgtcagcaactgtatcaggatcaccagtggatgcgtgatttcggtgaaagcctgctggtttatcgtccgccgatcgacacccgttcggtgaaagaagtgataggccagaaatccaacggcaaccaggaaaaagcgctcaacttcctgacgccgcaccagaagtggggtatccactccacctacagcgacaacctgctgatgctgactttaggtcgcggtggtccggtggtctggttgagtgaagccgatgccaaagatctgggtatcgccgataacgactggattgaagtattcaacagcaacggtgctctgactgcccgtgcggttgtcagccagcgtgttccggcagggatgaccatgatgtaccacgcgcaggaacgtatcgttaacctgcctggttcggaaattacccaacagcgtggtggtatccataactcggtcacccgtatcacgccgaaaccgacgcatatgatcggcggctatgcccatctggcatacggctttaactactacggcaccgtaggttctaaccgcgatgagtttgttgtagtgcgtaagatgaagaacattgactggttagatggcgaaggcaatgaccaggtacaggagagcgtaaaatgaaaattcgttcacaagtcggcatggtgctgaatctcgataagtgcatcggctgccacacctgttcagttacctgtaaaaacgtctggaccagccgtgaaggcgtggaatacgcgtggttcaacaacgtggaaaccaagccgggtcagggcttcccgactgactgggaaaaccaggaaaaatacaaaggcggctggatccgtaaaatcaacggcaaactgcagccgcgcatgggtaaccgtgccatgttgctgggtaaaatcttcgctaacccgcatctgccggggatcgacgattattacgagccgttcgattttgactatcagaacctgcataccgcgccggaaggcagcaaatcgcagccgattgcccgtccgcgttcgctgattaccggggaacggatggcgaaaatcgaaaaagggccgaactgggaagatgacctgggtggtgagtttgacaaactggcgaaagacaagaacttcgacaacatccagaaggcgatgtatagccagttcgaaaacaccttcatgatgtatttgccgcgcctgtgcgaacactgcctgaacccggcatgtgtggcgacctgcccgagcggtgcgatttacaagcgtgaagaagatggcatcgtcctgatcgaccaggataaatgccgtggctggcgtatgtgcatcaccggatgcccgtacaaaaaaatctacttcaactggaagagcggtaagtctgagaagtgcatcttctgctatccgcgtattgaagcgggtcagccgaccgtgtgctcagaaacctgtgtcggtcgtatccgttatcttggcgtgctgctgtacgatgccgacgcgattgaacgtgcagccagcaccgagaacgagaaagatctttaccagcgtcagctggaggtgttcctcgatccgaacgatccgaaagtcatcgagcaggcgattaaagacggtattccgctgagcgttattgaagccgcacagcagtcgccggtttataaaatggcaatggaatggaaactggcgctgccgctgcatccagaatatcgcacactgccgatggtctggtacgtgccgcctctgtctccgattcagtctgcagcagacgcgggtgagctgggtagcaacggcattctgccagacgtcgaaagcttgcgtattccggtacagtatctggcgaatctgctgaccgccggtgataccaaaccggtactgcgcgcactgaaacgtatgctggcgatgcgtcattacaaacgtgctgaaaccgttgacggtaaagttgatacccgtgcgctggaagaggtcggtctgaccgaagcccaggcacaggagatgtaccgttatctggcgattgctaactacgaagatcgctttgtggtgccgagtagtcatcgtgaactggcacgggaagccttcccggagaaaaatggctgcggctttacctttggtgatggctgccacggttcagataccaaattcaatctgttcaacagccgtcgtatcgatgccatcgatgtgaccagcaaaacggagccgcatccatgatcgaactcgtgattgtatcgcgtctccttgaatatccggatgctgccttatggcagcatcaacaagagatgtttgaggcgattgctgcgtcgaaaaatctgtcgaaagaagatgcccatgcgctgggcattttcctgcgcgatttaacggcgatggatccgctcgatgcccaggcccagtacagcgaactgttcgaccgtggccgcgccacgtcactgttgctatttgaacatgttcacggtgaatcccgtgaccgcggccaggcgatggtggacctgctggcgcagtacgagcagcacggcttgcagttaaacagccgcgaattaccggaccatctgccgctgtatctggagtacctgtcgcagctgccgcaaagcgaagccgtggaaggtttgaaagatatcgcgccgattctggcattgctgagcgcgcgtctgcaacagcgtgaaagccgttatgccgtgatgtttgatctgctgctgaaattggccaataccgctatcgacagcgacaaagtggcggaaaaaattgccgacgaagcgcgcgatgatacgccgcaggcgctggatgctgtctgggaagaagagcaggttaaattctttgctgacaaaggctgcggtgattcagcaatcactgctcatcagcgtcgctttgccggtgccgtcgcgccgcaatatctgaatatcaccaccggaggacagcactaatgcaattcctgaatatgttcttctttgatatctacccgtacatagccggggcggtcttcctgattggtagctggctgcgttatgactacgggcagtacacctggcgcgcggcgtccagccagatgctggatcgcaaagggatgaacctggcgtcgaacctgttccatatcggtattctggggatttttgttggtcacttcttcggtatgctgacgccgcactggatgtatgaagcctggctgccgattgaagtgaaacagaaaatggcgatgtttgctggtggtgccagcggcgtgctgtgtctgattggcggcgtgctgttgctgaagcgtcgtctgttcagcccacgcgtgcgtgcaaccactaccggagcggatatcctgatcctgtcgctgctcgttatccagtgcgcgctgggcctgttgaccattccgttctccgctcagcatatggacggtagcgagatgatgaaactggttggctgggcgcagtcggtggtgaccttccacggtggcgcttctcaacacctcgatggtgtggcgtttatcttccgtctgcacctggtgctggggatgacgttattcctgctgttcccgttctcgcgtctggtacacatctggagcgtaccggtggagtatctgacacgtaagtaccagctggtgcgcgctcgtcactaagcgaattttagttcacatagaccctgcttcggcggggtttttttatgggcacggtgcggggtgagttgtcggatgcgcttcgcttatccgacctacaggggaggatattgtaggcccggtaaacgtggtgccatcgggcaaaattagctcggagtaacaggttttgattatttaaggaagcgatggtggtgggggaaggattactcagcgctgcgcgcttcgcccttcgggtcgttgcctgcggcaacgctctctcgctggcgctcaagtcgaaccttggtcgaagcttctcatccttccccgcttgggcagaatatttgattgcggattcgtttgagaattccggggcttttgaaagtgatggtggtgggggaaggattactcagcgctgcgcgcttcgcccttcgggtcgttgcctgcggcaacgctctctcgctgacgctcgagccgaaccttagtcgaagcttctcatccttccccgcatgggcagaatatttgattgcggattcgcttgagagttcagggacttttgaaagtgatggtggtgggggaaggattactcagcgctgcgcgcttcgcccttcgggtcgttgcctgcggcaacgctctctcgctggcgctcgagtcgaaccttggtcgaagcttctcatccttccccgcatgggcagaatatttaattgcggattcgttgggaagttcagggacttttgaaagtgatggtggtgggggaaggattcgaaccttcgaagtcgatgacggcagatttacagtctgctccctttggccgctcgggaaccccaccaggggtaattcaaattttgaggtaatgcttgagatggtggtgggggaaggattattcgtcgcttcgctcctcacccttcgggccgttgcctgtggcaacgttctctcgctttcgctcgaatcgaaccttagtcgaaggttctcacccttccccgatgagtgcaaactttcacaatctcaccgaagttaccacatcgctgtggtgaattatggtggtgggggaaggattattcgtcgcttcgctcctcacccttcgggccgttgcctgtggcaacgttctctcgctttcgctcgaatcgaaccttagtcgaaggttctcacccttccccgatgagtgcaaactttcacaatctcaccgaagttaccacatcgctgtggtgaattatggtggtgggggaaggattcgaaccttcgaagtcgatgacggcagatttacagtctgctccctttggccgctcgggaaccccaccacggggtaatgctttttactggcctgctcccttatcgggaagcggggcgcatcatatcaaatgacgcgccgctgtaaagtgttacgttgagaaaaatgaactggttgcgtaattttcatccgtaacggattaaaggtaaccagttatttttgctggcgattaaagaataatcgttcgattaccgtaaacaaagacgcgctgtgccagtactttgtatagtgcacgacttaagacgtttttctcgacgtcacgacctgcgcgcatcatatcttcagctgtgtaggtatgatcgacatgaataacgtcctgcatgatgattgggccttcgtccagattgtcattcacatagtgagcggttgcgccaataatcttcacaccacgttcataggcctggtgataaggacgtgcgccaataaacgctggcaggaatgaatggtgaatattgatgatcttattcgggaagcgtgccacaaattccggcgttaatacccgcatatacttcgccagcaccacgtagtcaggttgataagcatcaatggcatccgccatcttttgatcgtgctcgttgcgggttaacccttcatggcttaccagctcaaacggaatatcaaaacgctcaaccagagaacgtaaagtatcgtggttaccaataactgccgcgatttcgacatccaggccgccgtaattggctttcatcaacaaatcgccaaggcaatgcgcttctttagtgaccagaatcactatccggcgacgaccggcaggattcagctcacgcacggagccttctggcaatgcgctatcgagatccgccagcagggtggaatcattaaaaatcccttccagttccgtgcgcataaaaaagcgcccggtacggtgatcaacaaattcattgttctgtacgatatttaactcgtgcttgtagcaaatattggtaatacgtgcgatcagacctttttggtccggacaaatagtacgcagaactttacgttggagtgaatgcattgctggaaaaaccttgttgagagtgtttgctaaaccgtaccgtcaaccattattggccgcagcactttttaaattttttacctgaaccacaagggcagggatcgttgcgaccaaactgcggacgtgtaccgtcaatatagtaccattgaccgttttctttcaaaaatcgcgaacgttcaattattgcacctgttttaccaccttcggtaaatcgagcaacaaaactgacaaatccgatattgtcggcgtcctgccaacaatgttcaaatacggtcaatcccaaccattcagtatgcgcaaatccggccatcaattcggcacgtaacgccgctgctccacaagagggatgccaggtctttattaaataatctgcgtcttgcatcacaaaagcgcagtaacgcgaacgcatgagatgttctggatcaggtgcaaccttttcaccagacacataagggtggcaacataggctatactcgacagcactaccacagggacaaagctgagacacaaataatctccctggaaacaataacggcgtattaaccgcctgagtagcactatgttaaccgagcagtagcgatgtggctacgattgcattccaggggaatcttgcgggaataatgagaaagataaaaatagggctggcgctgggatctggcgcggcgagaggttggtcgcatattggcgttattaatgcgctaaaaaaagtgggtattgaaattgatatcgttgcaggatgttcaattggttcgctggtgggcgctgcctatgcatgcgatcgattatctgcgctggaagattgggtgacctctttcagttattgggatgttttacgcctgatggatctctcctggcagcgcggtgggttactgcgcggcgagcgtgtcttcaatcaataccgcgaaataatgccggaaacagagatcgaaaattgttcccgtcgctttgcggctgttgccaccaatttaagtacgggacgtgaattatggtttactgaaggcgatctccatcttgctattcgcgcatcatgcagtattccaggactcatggcacctgttgcacataacggctactggctggttgatggagcagtcgttaacccaattcctatttccctcacgcgtgcattgggggctgatattgtgatagcggttgacctgcagcacgatgctcatttgatgcaacaagatttgctctcctttaatgtcagtgaagaaaatagcgagaatggtgattctctgccgtggcatgcgcgtctgaaagaaaggttaggcagcataacgacacgtcgggcggtgacagcgccaacggcaacagagattatgaccacttctatccaggtgctggagaaccgccttaaaaggaaccgcatggcaggtgatccgcccgatattctgattcaacctgtttgcccgcaaatatctacgcttgatttccatcgcgcgcacgctgccattgcggccggacagctggcagtggaaaggaaaatggacgaacttttgccgttggtacgcaccaacatttgaccagaatttttatctacacttaagttaattctgacaggcgcaggtggcaatagcatgccactattgagtaaagccagtcaggggagagaacatgacgcagccattggtcggaaaacagattctcattgttgaagatgagcaggtatttcgctcgcttctggattcatggttttcctcattgggagcgacaacggtactggcggctgatggggtggatgcccttgagttgctgggaggtttcactccagacctgatgatatgtgatatcgcgatgccacgaatgaacgggcttaaactgctggagcatatacgtaacagaggcgaccagaccccagttctggtgatatctgccactgaaaatatggcagatattgccaaagcgttacgtctgggcgttgaagatgttttgctgaaaccagttaaagatctgaatcgcttgcgcgagatggtttttgcctgtctctatcccagcatgtttaattcgcgcgttgaggaagaggaaaggctttttcgcgactgggatgcaatggttgataaccctgccgcagcggcgaaattattacaggaactacaaccgccggttcagcaggtgatttcccattgccgggttaattatcgtcaattggttgccgcggacaaacccggcctggtgcttgatattgccgcactttcggaaaacgatctggcattttattgccttgatgtcacccgagctggacataatggcgtacttgctgccttgttattacgcgcattgtttaacggattattacaggaacagcttgcacaccaaaatcaacggttgccagagttgggcgcgttattgaagcaggtaaaccatttacttcgtcaggccaatctgccggggcagtttccgctattagttggctattatcatcgcgaactgaaaaatctcattctggtttctgcgggtctgaatgcgacgttaaataccggcgaacaccaggtgcaaatcagtaatggtgttccgttaggcactttaggtaacgcttatttgaatcaattgagccagcgatgcgatgcctggcaatgccaaatatggggaaccggtggtcgactgcgcttgatgttgtctgcagaatgagcaaacgataacgcgggctaaatttgcattacctgctaatgtcggctggtggtactatcgtcgccattcgtataagtaattgtcttaattatgctaactcgcctccttttcagaacttagccccttcggggtgctgatatactgggatgcgatacagaaatatgaacacgttcaaaacacgaacagtccaggagaatttaaatggctgccattaatacgaaagtcaaaaaagccgttatccccgttgcgggattaggaaccaggatgttgccggcgacgaaagccatcccgaaagagatgctgccacttgtcgataagccattaattcaatacgtcgtgaatgaatgtattgcggctggcattactgaaattgtgctggttacacactcatctaaaaactctattgaaaaccactttgataccagttttgaactggaagcaatgctggaaaaacgtgtaaaacgtcaactgcttgatgaagtgcagtctatttgtccaccgcacgtgactattatgcaagttcgtcagggtctggcgaaaggcctgggacacgcggtattgtgtgctcacccggtagtgggtgatgaaccggtagctgttattttgcctgatgttattctggatgaatatgaatccgatttgtcacaggataacctggcagagatgatccgccgctttgatgaaacgggtcatagccagatcatggttgaaccggttgctgatgtgaccgcatatggcgttgtggattgcaaaggcgttgaattagcgccgggtgaaagcgtaccgatggttggtgtggtagaaaaaccgaaagcggatgttgcgccgtctaatctcgctattgtgggtcgttacgtacttagcgcggatatttggccgttgctggcaaaaacccctccgggagctggtgatgaaattcagctcaccgacgcaattgatatgctgatcgaaaaagaaacggtggaagcctatcatatgaaagggaagagccatgactgcggtaataaattaggttacatgcaggccttcgttgaatacggtattcgtcataacacccttggcacggaatttaaagcctggcttgaagaagagatgggcattaagaagtaacatccgtatcggtgttatccacgaaacggcgttgagcaatcgacgccgtttttttatagcttattcttattaaattgtcttaaaccggacaataaaaaatcccgccgctggcgggattttaagcaagtgcaatctacaaaagattattgcttgatcaggaaatcgtcgagggatttaccttgctcatccattgcttttttgattacagctggagtacggccttggccagtccaggttttagtttcgccgttttcgtcaacgtagctatattttgccggacgctgagcacgtttagctttggtgccagatttaacggcagcaaggctattcagcagttcgttcgggtcaataccgtcagcgatcagcatttcgcgatattgctgcagtttacgagtgcgctcttcaacttcagcagcagccgcgctttcttcttcgcgacgttcgttaacaacaacttctaatttttccagcatttcttccagcgtttcaagtgtacattctcttgcctgcgcacgaagagtacggatgttgttcagaattttaagtgcttcgctcattgtagtaatctcaaacttatattggggtggtttgttgaggtaataatagagccttaaattcagttgtgcaatagccaggaatgtaaggaattcaaaattgttctttattttgtgccgccaataaatatcttttcataaaattagccagaaaagacgcggcatatagccctatttacaccgatgatttcgcagcacgtgaggttaaaacttcctgattcatgtcacattttatggggagattatcgtaggctgacgacctttcagtcttctgtattagttgtgtttacgagaattccctattaagcgaatgatgaaaagtagaacagtcgcaataagagcatggacttagtattgcactatctcctggaggtcaacagagggctattacttgcgcaacaggttaaagattgtgaatagttaccagcagtcatttacccgcttataacaagcgaggcagttgtaatgatagctcagaaggattatgcaaggcttcgtaagggagaacgcatatacccacttctgtgcatactgttgagctgaaaaactgacgaattatgataaactccagccaactttatttcatatcattgagggcctgtggctgatggcacagctatatttctactattccgcaatgaatgcgggtaagtctacagcattgttgcaatcttcatacaattaccaggaacgcggcatgcgcactgtcgtatatacggcagaaattgatgatcgctttggtgccgggaaagtcagttcgcgtataggtttgtcatcgcctgcaaaattatttaaccaaaattcatcattatttgatgagattcgtgcggaacatgaacagcaggcaattcattgcgtactggttgatgaatgccagtttttaaccagacaacaagtatatgaattatcggaggttgtcgatcaactcgatatacccgtactttgttatggtttacgtaccgattttcgaggtgaattatttattggcagccaatacttactggcatggtccgacaaactggttgaattaaaaaccatctgtttttgtggccgtaaagcaagcatggtgctgcgtcttgatcaagcaggcagaccttataacgaaggtgagcaggtggtaattggtggtaatgaacgatacgtttctgtatgccgtaaacactataaagaggcgttacaagtcgactcattaacggctattcaggaaaggcatcgccacgattaataagaatttctttactgacagggtgagcagggcacttttatcctgtcagttcgttttacgcacttcttccgggctatatacccttctcggcagttttttaacgccgctatacgcctcacagggctcttaagcaccgacgttgacttgtgacctgtaaagtacaatatccctgtgtttaggcgttatacatcgtcgcaaatatgatgaaggctaatgctgtcggtttatggaaaagttgctttgggtaaacaaaaaatacggccccagaagggcaatgccgttcacttaagaggagcggcactatgtttcacaggataacgggtttttgatatcttaaccgacctcggccttgatggtcgggggcgttttgttatgaacaccacttccagagcaccccgaagatgctccagtcgtttcgggatggtccctggtgacgccgtgtttcccagctctatcatttctgatgcgatattcttccacgcaggcagtagccagtggcggttacaacccttctggttcagcgtcagcagcaggtcttcgctgtaaaaaagtttatcaaacaacgtaatagagttatccgggatggtggcgagcatggagtgggccagcacagtttcgctctgccggtaaggtgcggtcacggcattcagcagaatgtgacttcccaggttcattaaggccaccagacgcataaccgggtaggcgttctgccgcttagtggatgtgttggcagacccataatattcacgcagctcgggtttatcaggtgtcctgaactgtgcgccatcaatggcaaaaagttgcaggccgtgccagtcatccttcaggtaacgttccgcgcccctgtctgtgcggtctggcggaagagccattccactggggcggcccccacgcgctgacgcgcctgggtgacagcgctgcgggccagcaggttcatccccgcttcgccatccgcgctcaggttcagacggcgaacaacatcggtaattggctcattgcaccaccatccagataaccatgtcccccggtaaacgacggcggcgaacggtcgcatgagcagaaagcgtcaggcagtgttgtatccactcggtgggaaggtgttctgcaaatagttgtgcagagggcggaggcataagcggatggtcactgaaatcgagcagatcattgagaagtggcataagaaaacggctccctgttgtggaagccgttatagtgcctcagtttaaggatcggtcaactaatccttaactgatcggcattgcccagaaggggccgtttatgttgccagacagcgctactgattaagcggattttttcgcttttttctcagctttagccggagcagcttctttcttcgctgcagtttcaccttctacataatcacgaccgtagtaggtatccagcagaatctgtttcagctcggagatcagcgggtaacgcgggttagcgccggtgcactggtcatcgaatgcatcttcagacagtttatccacgttcgccaggaagtctgcttcctgaacgccagcttcacggatagatttcggaatacccagttcagctttcagcgtttccagccatgccagcagtttctcgatcttagcagcagtacggtcgcccggtgcgctcagacccaagtggtcggcaatttcagcataacgacggcgagcctgcggacggtcatactggctgaatgcagtctgcttggtcgggttgtcgttcgcattgtagcgaataacgttacaaatcagcagggcgtttgccagaccgtgcggaatatggaactgggaacccagtttgtgcgccattgagtgacatacacccaggaaggcgttcgcaaacgcgatacccgcgatagtcgctgcactgtgaacacgttcacgcgctaccggatttttagacccttcgtggtaggacgctggcagatattctttcagcagtttcagtgcctgcagagcctgaccatcagagaactcagatgccagtacagaaacataagcttccatggcgtgagttactgcgtccagaccaccgaaagcacacagggacttcggcatgtccataaccaggttggcgtcgacaatcgccatatccggagtcagcgcatagtctgccagcggatatttctgaccagtagcgtcgtcagttacaaccgcaaacggagtgacttcagaacctgtaccagaagtggtggtgacagcgatcattttcgctttcacgcccattttcgggaacttgtagatacgtttacggatatccataaagcgcagcgccagctcttcgaagtgagtttccggatgttcgtacataacccacatgatcttcgcggcgtccatcggggaaccaccacccagcgcgataatcacgtctggtttgaaggagtttgccagttctgcacctttacgaacgatgctcagggtcgggtccgcttctacttcgaagaagacttcagtttcaacgcctgctgctttcagtacggaagtgatctgatcagcataaccattgttgaacaggaagcggtcagtcacgatgagcgcacgtttgtggccatcagtaatcacttcatccagcgcgattggcagggagccacggcggaagtagatagatttcggaagtttgtgccacaacatgttttcagctcgcttagcaacggttttcttgttgatcaggtgtttcggaccaacgttttcagagatggagttaccaccccaagaaccacaacccagagtcagggaaggtgcgagtttgaagttatacaggtcaccgataccaccctgagacgctggggtgttaatcaggatacgcgccgttttcattttctgaccgaagtaagaaacgcgagccggttggttatcctggtcagtgtacaggcaagaggtatgaccgataccgcccatagcaaccagtttctctgctttttctaccgcgtcttcgaaatctttagcgcggtacattgccagagtcggggacagtttttcatgtgcgaacggttcgctttcatcaacaacggtcacttcaccgatcagaatcttggtgttttctggtacagagaagcctgccagttcagcaattttataggctggctgaccaacgatagccgcgttcagcgcaccgtttttcaggataacatcctgaacagctttcagctctttaccctgcaacagatagccgccgtgggttgcaaaacgttcacgtacagcgtcataaacagagtcaacaacaacaacagactgttcagaagcacagattacgccgttgtcgaaggttttggacatcagtacagatgcaactgcacgtttgatatcagcagtttcatcgataacaactggagtgttgcccgcgcctacaccgatagctggtttaccggagctgtatgcggctttaaccatgcccggaccaccagtcgcgaggatcaggttgatgtctgggtggtgcatcagtgcgttagacagttcaacagaaggttgatcgatccagccgatcagatctttcggagcaccggcagcgatagcagcctgcagaacgatatcagccgctttgttggtggcatcttttgcacgcgggtgcggggagaagataatggcgttacgggtcttcagactgatcagcgatttgaagatagcagttgaagtcgggttagtggtcggaacgataccgcaaataataccgattggttcagcgatagtgatggtaccaaaagtgtcgtcttcagacagaacaccacaggttttttcatctttataggcgttgtagatatattcagaagcaaagtggtttttgatcactttatcttcgacgatacccatgccggattcggcaacggccattttcgcgagtgggattcgagcatctgcagcagccagagcggcggcgcggaagattttgtctacttgctcttgagtgaaactggcatattcacgctgggctttttttacacgctctacgagtgcgttaagttcagcgacattagtaacagccataatgctctcctgataatgttaaacttttttagtaaatcatctgctcgaatacgagagtatagtcagtgcggtgatgatttgcttaacctatgaaaatcaaaagcttactcgcgctcacactcactgtgatttactaaaagagtttaaacattagagttattatctctaatgcgtcacttccaggtggcgtaagcaagattactcacttctgggtactgattacgtgatccaaatcaaatttttgcaaagctgacacctttcagcatcgcttttcgccattatagctaacagttaataaattgtagtatgatttggtggctacattagcatgttttgcacaactagataacaataacgaatgatagcaattttaagtagttaggaggtgaaaaatgctgtcaaaaggcgtattgtcagcgcgtcttttcaaccttatttatggctaacattatccggcttttgcttcggagctaaccgtgattcagaccttttttgattttcccgtttacttcaaatttttcatcgggttatttgcgctggtcaacccggtagggattattcccgtctttatcagcatgaccagttatcagacagcggcagcgcgaaacaaaactaaccttacagccaacctgtctgtggccattatcttgtggatctcgctttttctcggcgacacgattctacaactttttggtatatcaattgattcgttccgtatcgccgggggtatcctggtggtgacaatagcgatgtcgatgatcagcggcaagcttggcgaggataaacagaacaagcaagaaaaatcagaaaccgcggtacgtgaaagcattggtgtggtgccactggcgttgccgttgatggcggggccaggggcgatcagttctaccatcgtctggggtacgcgttatcacagcattagctatctgtttggtttctttgtggctattgcattgttcgctttatgttgttggggattgttccgcatggcaccgtggctggtacgggttttacgccagaccggcatcaacgtgattacgcgtattatggggctattgctgatggcattggggattgaatttatcgttactggtattaaggggattttccccggcctgcttaattaattcctttcaaatgaaacggagctgccatgctccgtttacttcgtcattatttttactttgttcccgcgcagttatcaaaagcaaaaggaataggtaaaaatattcttctcaaattacagttagttataaggatttccttaactgcttctcctcaccatcatgttattttcgccacatcataatcctgggcttgctgaagaataattgaaatgatattagtaattccactgcctttggtagaggaaagtgctaaataataatcaattgttaaattattgtgcatttcactactggaactgtaatcagaaaagatagacatgcttagccaatctctatttgattgaattgaaagatgtttgttaaggcatggatgcaagctatagattctgatacggtcaataaaagagaattgcttaacaattttgcaaaatgtattggcgagtaagaaccgcatttggtactttccgggcaaccgccagacgattctttattggtaatgagaataattaacaattaaagagcgtcgcgaaagaataatgtgtctcgacaggggagacacagtacgaatcgacataaggtgatcgtctgaatcaccagaataaataaagtcggtgatagtaatacgtaacgataaagtaacctgacagcagaaagtctccgagcctgtgcagggtcccaatccgggattacacatgctggttaataccagtaattataatgagggagtccaaaaaacaatgaccaacatcaccaagagaagtttagtagcagctggcgttctggctgcgctaatggcagggaatgtcgcgctggcagctgatgtacccgcaggcgtcacactggcggaaaaacaaacactggtacgtaacaatggttcagaagttcagtcattagatccgcacaaaattgaaggtgttccggagtctaatatcagccgagacctgtttgaaggcttactggtcagcgatcttgacggtcatccagcacctggcgtcgctgaatcctgggataataaagacgcgaaagtctggaccttccatttgcgtaaagatgcgaaatggtctgatggcacgccagtcacagcacaagactttgtgtatagctggcaacgttctgttgatccgaacactgcttctccgtatgccagttatctgcaatatgggcatatcgccggtattgatgaaattcttgaagggaaaaaaccgattaccgatctcggcgtgaaagctattgatgatcacacattagaagtcaccttaagtgaacccgttccgtacttctataaattacttgttcacccatcaacttcaccggtgccaaaagccgctatcgagaaattcggcgaaaaatggacccagcctggtaatatcgtcaccaacggtgcctataccttaaaagattgggtcgtaaacgaacgaatcgttcttgaacgcagcccgacctactggaacaacgcgaaaaccgttattaaccaggtaacctatttgcctattgcttctgaagttaccgatgtcaaccgctaccgtagtggtgaaatcgacatgacgtataacaacatgccgatcgaattgttccagaagctgaaaaaagagatcccggacgaagttcacgttgatccatacctgtgcacttactattacgaaattaacaaccagaaaccgccattcaacgatgtgcgtgtgcgtaccgcactgaaactaggtatggaccgcgatatcattgttaataaagtgaaagcgcagggcgacatgcccgcctatggttacactccaccgtatactgatggcgcaaaattgactcagccagaatggtttggctggagccaggaaaaacgtaacgaagaagcgaaaaaactgctggctgaagcgggttataccgcagacaaaccgttgaccatcaacctgctgtataacacctccgatctgcataaaaagctggcgattgctgcctcttcattgtggaagaaaaacattggtgtaaacgtcaaactggttaaccaggagtggaaaacgttcctcgacacccgtcaccagggtacttttgatgtggcccgtgcaggctggtgtgctgactacaacgaaccaacttccttcctgaacaccatgctttcgaacagctcgatgaataccgcgcattataagagcccggcctttgacagcattatggcggaaacgctgaaagtgactgacgaggcgcagcgcacagctctgtacactaaagcagaacaacagctggataaggattcggccattgttcctgtttattactacgtgaatgcgcgtctggtgaaaccgtgggttggtggctataccggcaaagatccgctggataatacctatacccggaatatgtacattgtgaagcactaatggcaatgcgtggggcaggagtgtcctgctccacggtgtctgatttttatcgcattacagaaggcacaggccagaaggtagggcaatgttaaaatttattctacgtcgctgtctggaagcgattccgacgctatttattcttattactatttcgttctttatgatgcgcctcgcgccgggaagcccttttaccggcgaacgtactttaccgccagaagtgatggccaatatcgaagcgaaatatcatcttaatgatccgatcatgacacagtatttcagctacctgaaacaactggcgcacggtgatttcggtccatcgtttaaatataaagattattcggtcaatgacctggttgcatccagttttcccgtttctgccaaattgggagccgcagcatttttccttgcggtaatactgggtgttagtgctggcgttattgccgcattaaaacaaaacaccaaatgggactataccgtgatgggcctggcaatgaccggggttgttatccccagttttgtggttgcaccattattagtcatgatatttgcgatcattttgcattggctgccgggcggtggctggaatggtggggcgcttaaattcatgatattgccgatggtggcgttgtcactcgcttatatcgccagtattgcgcgtattacccgtggctctatgattgaagtattacactccaactttattcgtactgcccgggcgaaagggttacctatgcggcggatcattttacgccacgcattaaaacctgctctgttacccgtgctctcctatatgggccccgcatttgtcggcattattaccggttctatggtcatcgaaaccatttatggtttgccggggattgggcaactgttcgttaatggcgcattgaaccgtgactattccttagtgttaagcctgaccatcctggttggtgcgttaaccattttgtttaatgccattgtcgatgtgctatatgcggttatcgacccgaaaatccgttactgatactggagctcgcgatgatgttaagtaagaaaaacagcgagacgctggaaaatttcagtgaaaagctggaggtcgaagggcgcagcttgtggcaggacgcacgtcgacgttttatgcataaccgtgcggcggttgccagtctgatagtgctggtgctgatcgcgttatttgtaatcctggcaccgatgctttcgcagtttgcctatgacgatactgactgggcgatgatgtccagcgccccggatatggagtccggtcactactttggtactgactcatccggtcgcgacctgcttgtgcgcgttgcgattggcgggcgtatctcactcatggtcggtgttgctgcggcactggtggcagtggtcgtggggacactttatggttcgctttccggttatctgggcggtaaagtggattcggtaatgatgcgtctgctggaaatcctcaactccttcccattcatgttcttcgtcattttgcttgtgacctttttcggtcaaaacatcctgctgattttcgtggcgattggcatggtttcctggctggatatggctcgtattgtgcgtggacaaaccctgagtctgaagcgcaaagagtttattgaggcggcacaagttggcggtgtatcgacatcgggcattgttattcgccacattgtgccgaatgtactcggtgtggtggtggtctacgcatcacttctggtgcccagcatgatcctctttgaatctttccttagcttcctggggttgggtacgcaagagccgttaagcagctggggtgcattgctgagtgatggcgcgaactcgatggaagtctctccatggttattgttgttcccagcgggattcctcgtggtgacgctgttttgtttcaactttatcggcgatggcttgcgtgatgccctcgacccgaaagatcgttaaggagtgcagccatgagcgtaattgaaactgcaactgtgccgctcgcacaacaacaggctgacgcactgctgaacgtgaaagatttgcgtgtcacctttagtaccccggacggcgacgtcacggcggtcaatgatttgaatttttccctacgtgccggagaaacgctgggtattgtaggtgagtctggttcgggtaaatcgcaaactgcatttgcgttgatgggcctgttggctgccaacggacgtattggcggatcggcaaccttcaatgggcgtgaaatcctcaatttgccagagcatgaactcaataaactgcgcgctgaacaaatctcaatgatttttcaggacccaatgacttcgttgaatccctatatgcgcgtcggtgagcagttgatggaagtgctgatgctgcataagaacatgagcaaagctgaggcgtttgaagagtcggtgcggatgctcgatgcggtaaaaatgccggaagcgcgtaaacgcatgaaaatgtacccgcacgaattttctggcggcatgcgtcagcgagtcatgattgcgatggccttgttatgtcgacctaagctgctgattgcggatgaaccaacaactgcgctggacgtcaccgtacaggcgcagatcatgacgctattaaatgaactgaagcgggaatttaataccgccatcattatgatcacccacgatcttggcgtggtggcggggatctgcgacaaagtgctggtaatgtacgccgggcgcacgatggaatatggcaacgcgcgcgatgtcttttatcaacccgttcatccttattctatcggtttgctcaacgcggtgccgcgtctcgatgcggaaggtgaaacaatgttgaccatcccgggtaatccgccaaacctgctgcgattaccgaaaggttgcccgttccagccacgttgtccgcatgcgatggaaatttgtagtagcgcaccgccgctggaagagtttacgcctggccgtctgcgtgcttgctttaaaccggtggaggaactgttatgaatgctgtaactgaaggaagaaaagtcctccttgaaatcgccgatcttaaagtgcactttgaaatcaaagatggcaaacagtggttctggcaaccgccgaaaacgctcaaagccgtcgatggtgtcactcttcgcctgtatgaaggggaaacattaggtgtggtaggggaatcgggatgcggtaagtccacctttgctcgcgccatcatcggtttggtcaaggcgaccgacggtcatgttgcctggttaggtaaagagttgctgggcatgaaacccgatgaatggcgtgccgttcgcagtgatattcagatgattttccaggatccgttggcatcgctaaacccgcgtatgaccatcggcgagatcatcgctgaaccactacgtacttatcatccgaaaatgtcacgccaggaagttcgcgagcgcgtgaaggcgatgatgctgaaagtcgggttattgcctaacctgattaaccgctatccgcatgagttctctggtgggcagtgccagcgtatcgggattgcgcgtgctcttattcttgaaccgaagctgattatctgtgatgagccggtgtcggcgctggacgtgtcaattcaggcacaggtggtcaacctgctccagcaattgcaacgtgagatgggattgtcattaatttttatcgctcatgacctggccgtggtaaaacacatttccgatcgtgtgttggtgatgtatctcggccatgcggtagaactggggacctatgatgaggtctaccacaatccactacatccttacaccagggcattgatgtcggcagtccccatacctgatccggatctggagaagaacaaaaccatccagttactggaaggggaattaccgtcgccgatcaacccgccttccggttgtgttttccgtacccgttgcccgattgccggtccagagtgcgccaaaacacgtcctgttctggaggggagtttcagacacgccgtttcttgcctgaaagtcgatccgctttaaaaacaataagggctgacagttgtcagccctttttcacgctaaaagcgattatttattcccgccagatgatatggcaaagtttgtgatctttttcgcggcataacagaatgcgggcaaaaacatcgttgatttcaccatcttcactgtccgccagaccaatcaccacttcggcaaaaaagtccgggttcaaatcgaaatcaacatgttcctgccagtcttccgccggatcgaataactccgcgccgccgcgctcttcaaactgaagattgaacagcagaacatcagctggatcgagattgtcggcagccagttcgagaaaaatatcgtaggcctgttcaagcgtttcatcttcagtcaggcgattgtttagatccatatccatagttactacctgtttaacctctgttggcgacgttttacagcaacggactgaagaagtaaaacagtcgctcggcgacacgttgccataatggacgttttagccataaacgggcatcgagcagacgtgaacgcgaaatataatcgtcctgaacggcggcgaggtcagcaccaaaacctttatcgtcgattgccagggtaatctcgaaatttagccacagactacgcatatcaaggttaactgtgccaaccagacttagttcgccatcgaccagcacgctcttggtatgcagtaacccgccttcaaactgataaattttaaccccagcagccagcagttccgtaaagaatgcgcgactggcccagccgaccagcatcgagtcattttttcgcggaaggataatactgacatccaccccgcgctgcgccgccgtgcaaatcgcatgaagtaaatcatcgcttggcacaaagtagggcgtggtcatgatcaaatattcacgcgccgaataagccgcagtcaataatgcctggtgaatgagatcttccggaaagccggggccagaagcaattgtgtgaatggtgtgaccgctggcctgttcaaacggcataatattgacatctggtggtggcggcagaatacgttttccggtttcaatctcccagtcgcaggaataaataatccccatcgcggtggcgatagggccttccatacgcgccatcagatcaatccattgccctacgcccgcatcttgtttgaagtagcgaggatcgaccatattcatgctgccggtgtacgcgatgtaattatcgatcatgatcatcttgcgatgttggcgcaggtccatacggcgtaaaaacacacgcatcagattgacctttaaggcttcgaccacttcaataccggcattacgcattagctcgggccacgggctgcggaaaaaagccacactcccggcggagtcgagcatcaatcggcaatgaatgccgcgtcgcgcagccgccattaatgattcagccacctggtccgccatgccgccgggctgccagatataaaacaccatctcaatattatggcgcgcgagctggatgtcgcggattaacgcctgcatcacatcatctgactcggtcatcagttgtagctgattccctttgaccccagcgatcccctgacgacgctcgcaaagcttgaataatggcgcagcgacactgctattttcttcggcgaagatatgcttacaggctttaaggtcgttaagccattttgcggtggaaggccacatcgctctggcgcgctcagcgcggcgtttgcctaaatggagctcgccaacggcaagataggcaataattccgactaacggcagaatgtaaataatcaacagccaggccatcgcggagggaactgcgcgtcgtttcattagaatgcgtaaagttacgcctgcaatgagcaaccagtatcccagaatggccaaccaactcaccaacgtataaacggttgtcatagattagaaatccttttgaaagcgcattgttatgagtttacgcatatggattcatctggcaaataaaaacgcgggaaaagcactggtcagcgtcgggggtgggggtataatgaccattctgttattgcatagagtagttaacatgaagcggagtagaacggaagtggggcgctggcgcatgcagcgtcaggctagccgacgtaaatcgcgttggcttgaggggcaatcgcgccgaaatatgcgtatccacagcatcaggaagtgcattctaaacaaacagcgtaactcgttattgtttgcgatctacaatatctaaatgtactgggcaccattgcggtgcccaataagtttactcttccgtctttaaactctatttttgcgccgattctttactgtcagctttcgtttctagttcatcgttatcgctgaaaataccatgacctgagttcaacaacattgaaacgagcatatcattattaatctcttcaccatttaaaactcgcgccagaatttcgctgccaaacagttgcggtgagagaatgatatccggatgtaccatcttaatcttattcaggtttttgctatcactgacggcgagaactgttttgacatcactgctcatatcttttgccgagagtacaacaaacgcgttatctgcatcgttatcactcagcgccagaatggcccggcaacgatcgattcccgctttctttaatacagaactgtcattactgtcaccggggataacatcagcattatcgcctaagcgttgctcaagttgcttgatatcatcttcaggcaagttgctgataaccgttacgttttgtccgcgttgattcagttgcaggatcgtattgatggcgagaatcgaatgtccgcaaacaataaaatgatctttacgatgcattgtatgattgtttccttttacaagtttgttgaatcccccgcggataagcggaccaaaaattgaggtcatagatgtggcaaaaacggtaatgccggaaataatgaccgaaatagtgaacaatcgtgctgattcagaaacagggacaatatcgccatagccgacggttgacatggtttctatcgaaaaatagaacgcggtcatcaaactttctattcgcggattaaaaccttcgcttaaataaagcgcaccgtaggttgagtaaaacagtaatgtcgtgaaactaataaatgcaaaaattgtcccggctgcggcgctactgtgggagaagtctttgcgcagtatcagcaaaaacaccagcgtaaaaatgcaaaatccaatactaaatttcagccagggataaaaatgcagggtgtaaattagcgctatcaacaacaaaatgatactgattgcccatgcgagctttgcccggaacagtaagccaatggagttcaggacaagaaagacgccgagcataaagagtggggcgtttgccagcaaggagagatccaactctgaaaatgctttgatatggaaaatatcaagcaaattgaccgacataccatagattgttttaaaaataagcaatccatttaaaaagacggccagcgcgagaatgtcgtgccgaagggtcacccataaatttgttgctgtttgtttgaatgtagcccagtgactcactgatacctctgtaaccacaattttgtttaattatcttagcgtgcacattttctgaacatacatgcagcgcgtgaatgtgttaaacaatagtagatgactttatccgcagtaatcaaaggatttgagcgagcaactgtacctcaggaaaggtcatttttcctgaatatgctcacatcatataaagaaatacagataaagttattatctgcttgtggtggtgaatgcactgaccggctataaggaaaggccaaacaagaacacggttgcaaaaaccgtgcccttaaatattgaatctctattcagaacactttcttaaatggtttcactgaaacgtgttcatagactcctgccgctacgtacgggtcagcatcggtccaggcctgagctgcttccagcgattcaaattcagcaataacggttgagccagtaaatcccgcagcccctggatcgttactgtctaccgctggcattggaccagctgtcaacaaacgaccttcatcatgcagtaactgtaaacgtgctaaatgtgccggacgaacggaaaggcgtttttcgaggctatcagctttgtcttgagcgtaaataacatacaacacgggcacaactccttgttcgggaaagttgtaaagtacgttatttgaaagggcgaagatctgcaacggaaagatgatgtctttgttaaggccatgcataaagtaagggtaattacgccaaaaatgacattttcactgatcctgatcgtcttgccttattgaatatgattgctatttgcatttaaaatcgagacctggtttttctactgaaatgattatgacttcaatgacccttgatttacctcgccgcttcccctggccgacgttactttcggtctgcattcatggtgctgttgtggcgggtctgctctatacctcggtacatcaggttattgaactacctgcgcctgcgcagccgatttctgtcacgatggttacgcctgctgatctcgaaccgccacaagccgttcagccgccaccggagccggtggtagagccagaaccggaacctgagccgatccccgaaccgccaaaagaagcaccggtggtcattgaaaagccgaagccgaaacctaagccaaaaccgaagccggtgaaaaaggtacaggagcagccaaaacgcgatgtcaaacccgtagagtcgcgtccggcatcaccgtttgaaaatacggcaccggcacgcctgacatcaagtacagcaacggctgcaaccagcaagccggttaccagtgtggcttcaggaccacgcgcattaagccgtaatcagccgcagtatccggcacgagcacaggcattgcgcattgaagggcaggttaaagttaaatttgacgttacgccggatggtcgcgtggataacgtacaaatcctctcagccaagcctgcgaacatgtttgagcgtgaggtgaaaaatgcgatgcgcagatggcgttatgagccgggtaagccaggcagtgggattgtggtgaatatcctgtttaaaattaacggcaccaccgaaattcagtaagcagaaagtcaaaagcctccgaccggaggcttttgactattactcaacaggtaaggcgcgaggttttccttcaggatcaaccgcgacatacttaaataatgcttctgtcgctttatagcgttgcccaattggttcagacgctacttttttcacccacacttcaatattaatgctgaccgatgtcgtccctttctggacacagcgtgcatagcagcacaccacatcgccgaccgcaaccggccgtaagaaagtcattccttcaacccgcacagtcactacgcgaccgtgggcaatttcttttgccagaatagcgccgccaatatccatttgtgacattaaccaaccaccaaagatgtcaccattggcattggtatcggcgggcatggctaaagtacgtaaaacaagatcgccctgagggacgttatgtgttgtagacatggtaaaaccgacttaaaaggaaaatcacaggcgcgatgctactatgattttcctgaggagaacagaggagatacagcgccagccccgaaggactggcagtctggttaggatttatcttcctgcggcatgtggcggtagatatagataccgcttaacaatgtgaagattaaggtaagggcggtcaggccaaagactttaaagttgacccaaatattttgcggcagccagaatgcgatgtagatgtttgccagaccgcaaaggataaagaaaacagcccaggccagattcagcttcgaccataccggttgcggcagcgtgagttctttacccagcatccgctgaattagcggctttttcatcacccattggctgactaacagggctcccgcaaatagagcataaatgactgtaaccttccatttaataaactcatcattgtggaagaacagcgtcaagccaccgaagacgaccaccagaacaaaagtgatcagggccatcttctcaaccttacgaaagcgaacccagctatagataagcacaatcgccgtggcgacgatcagcgccgcagtagccgcatagatgtcataaatcttgtaaaacgcgaaaaagacaaccagcggtaaaaaatcaagaaactgcttcattttacgattccgtaatcaaatgcttaaggttattggcgaatcaacatatacaggcggaacagatagatgagcaatatggctgaaatcaggttgctcaaggtgttcgccagtacggcaccaatttccggggttaatgcggcaaaagaagaggcaaaaagcagcaacagtgtttttgccagcaaccagctcagtactgcgggtgccaccagacgcatattcgcccaagtcagccgcatactgctacgcatcgaggcaaaaacgcccattttgtcctgtaccaacatcaccggtgccagggccagtaaaatggccatgataattcccggaacgaccaccagcatgatgccaatctgtactaaaagggtagtcagaaaaatcagaataaataactttggcaatatcggcgcactggcaccaatagctcgcagcgcactgactctctgacccgcagacaccagctggataattaatattacgcctccggcgagaatggcgttaccgattaatcctgaaaaagtggacgccgctgaagcctgcagcaaaatttgttgctgttccggtgacatattctgaaccaggtcgaacaacccactactgccgctaacgggcacgccgtcattgagctgcgcaagctgtgcatcactgggtgagaaaacatgccctaacaccactgtgataaacgcacatagcaacgataccaacagaatggtcataaattgattacggaagaaatttccggtgtcacggtatacggactgcgccgtgatagacatgcactctccttgagttttatgcaggtgttaattagcgggcaattgtaccctggttaagcctcgggtggcagcatcaggtcttgtatggaaaagcatatctttgtaaagcggaggtaattgctggccttcaggcatgggcaaatcgcggcaagtggcgaccgagttaatatttgcgtagcgaaaatatttaaaaattgatttaaatcacattaaccaggattctcaatgcaacttctaaattaatccagatcaataaagggtgaattatcatatgtaatgtgatctatgtaggatcatttgttactccaatgtaggtatattcgtcacgtttttataaccataacgacggagcggatatgaaaaagttaacagtggcggctttggcagtaacaactcttctctctggcagtgcctttgcgcatgaagcaggcgaattttttatgcgtgcaggttctgcaaccgtacgtccaacagaaggtgctggtggtacgttaggaagtctgggtggattcagcgtgaccaataacacgcaactgggccttacgtttacttatatggcgaccgacaacattggtgtggaattactggcagcgacgccgttccgccataaaatcggcacccgggcgaccggcgatattgcaaccgttcatcatctgccaccaacactgatggcgcagtggtattttggtgatgccagcagcaaattccgtccttacgttggggcaggtattaactacaccaccttctttgataatggatttaacgatcatggcaaagaggcagggctttccgaactcagtctgaaagattcctggggagctgccgggcaggtgggggttgattatctgattaaccgtgactggttggttaacatgtcagtgtggtacatggatatcgataccaccgccaattataagctgggcggtgcacagcaacacgatagcgtacgcctcgatccgtgggtgtttatgttctcagcaggatatcgtttttaattccgcacaaaaacgaccccgtaatatacggggtcaataaggacatggtataaagggtattatttcttcgcttctacgccatcagtttcagagcgaattaaaaatttctcagttgtttgcggaatattctgaatcagccagtcggccatttgcttttcctcatttaaaatcgcttcgatggttggaattgaagctgtatcaccggcattttttgctgctgctaatagtgaggtgtaacaggcgatttcaaattgctcgaagacatatccgctaatagagcctttgactatttcatcagaagggaatataccaccgattgactgcccaagcgcagccattttactcatggaatctttaatgactgaacgtgaaatgtcattacgatcaagaatagtttccagttgaacaatctggtttttggtttcactaagatgttgttcaatacgagcgcgtagttcaggataattatctatacggctggccatggattcaagcatagattcggcttgcttttccattgcgtgggcgtcacgtaaccagtcatgataatgttcaatacgattcatgaaaatgtcctctttataaaatgactaaaagttaaaattcatatttcaggctttattttcggctttcttatttacgttattaatggccagatcagtcagtttgatgtcggtggccttttcttcttccagggtttctttcagaagcttcgctgctttacggtaacctaattgttcagccagcgtcgctaatgtcccgtaactggcaatctcataatgctcgactttctgtgctgcggcaatcagtgcggcatcacgcacttcgtttttctcggtactttcgatgacctcattagcttcttcaataagaccttccattgccacacatttcatgcgcttaattttcaggttcgattcggactccacaacttgatcaatacgttcaatctgtccatgagtttcctcgaggtgcgcatgaaaagcctgacttaatttttcatttgatgttgctcttgcgagttttgccagtgcccgggttaattgtttttctgcgctgtaggtatctgaaagcaggtgaataaatacatcttcaatggtcttcatattcatatttttctccagtgaaatcactgcgagccatacggcccgcagatgcaattatctttatcagctgatattaataattaacggtgaatcaggatttgcctgatttattaccaccgctttgttgaccgccttttttacccgcttcagatgcgcgttgcggatcatttttaaaattaccgccgctatgctgaccgcctttacggcctgcgtcggatgccttctcacggtcttcggcgaaatttcctgaaccaccacgatgttcggccatgttatttctcccgttgcgttgcattgtttcattaatatgagtgttgtgtgtcgacactcattaaaattagtcgctaatgagaattagtcaaattaagcgcaacgagaaggtagagggaaaatatattttgaggaacattctggatatattaacaattacctgaggaataagtgacttagagaaaattattgattttactggtgttatgttgcgggattaatttgtttgattatattactgttgggcggaaaaatgacgtaagttgacgttcgaccggggtaagcgaaacggtaaaaagataaatattaaatgaatttaggatttttccggcttcattaaagaaagttaaaatgccgccagcggaactggcggctgtgggattaactgcgcgtcgccgctttcatcggttgtacaaaaactttcagtgccgccagcattttctctggctcattaatatgttgctcgatgattttaacaatggccgaaccagaaatcgcgcccgcagctcctgcatcaatcgctgcttttacctgatccggggcggaaataccaaatccctgcaatggaggtgcagcgttgtactctttcagcttcgcaaccagatgattgaggggtaacgcggcgcggttttctgcgccggtcacgcctgctcgtgacagcaaataggtgtaaccacgaccgtaagaggctatctggcgcagcaggtcgtcatcggcatttggcgggcagatgaagataggtgcgacattatgacgcaacgcggcctggcggaagggcgcggactcttcaactggcacatcggcaaccagcaccgaatcgacgccgactttttcgcactgggcataaaactcatcaatgcctttgttaaacaccagattggcatacatcaacaggccaatgggaatggtcgggtgtttctggcgaatcagtgccagcatttcaaaacattgtgccggagtcacacctgccgcaaaggcgcgcagagtggcgttttgaatcgtcgggccatccgccagtgggtcggagaaggggatacctaactccagcgcgtcagcaccggcttcaattagcgtatcgataattttcaatgactgctcaatgcccggatcaccgagcgtgacgaaaggaacgaatgcgccttctttgcgctccttcaactgggcaaacagagattcgtagcgttccatcagatttcccctcgtgctttcaaaatatcgtgaacggtgaagatgtctttatcgccgcgaccggaaaggttaaccaccagtagctgctctttatccgggttttcgcgcatcattttcaacgcatgggccagggcgtgggaggattccagcgccgggatgatcccttcgtgcaggcacagcgttttgaaggcttcaagggcttcatcatcggtaatagacacgtaatcagcgcgtccagtgctgttaagatacgcgtgttgtgggccgacagacgggaaatccagtccggcggagatggagtaagattcttcaatctgcccgtcttcggtttgcatcatcggcgctttcataccgaaatagatacccacgcgaccatgttttagcggtgcgccgtgctcgccagtttcgataccgtgaccacctggctccacaccaatcaggccgacgttggtttcattgatgaaatcagcaaacatgccgatggcattcgaaccgccgccaacacaggcgataacggcatccggcaggcgaccttctctttccagaatctgcgctttggtttcttcgccaatcatccgctgaaactcacgcacaatggtcggataaggatgcgggccagctgcggtgcccagcatatagtgcgcggtttcgtaactaccggaccagtcgcgcagcgcctcgttacaggcatctttcagcgtcgcggaaccgctatgcaccgggatcacttccgcacccattaagcgcatacgaaaaacgttaggcgactggcgttcaacgtctttggcacccatataaatacggcatttcaggccgagcagggcgctggcaagggccgacgccacgccatgctgaccggcaccggtttcggcgatgatttcggttttacccatccgcttcgccagtaacgcctgccccagcacctggttagttttatgcgcgccgccgtgcagcaaatcttcacgcttgagatacagcgtggtgttcgtcccggctgtaatgttctggcatttggtcagcgcggttggacgcccggcatagtttttcagcaggtcgttgaactgagcctgaaattcaggatctttttgcgcactgacaaaagcttcttccagctggcgcagagcaggcatcaggatttgtggcacgtacatgccgccaaactcaccaaaataggggttaagtaatgttgtcattgttcctttccttaatatgcgcgcagcgtctggaaaaccgaggccaaaagacgtgcgtctttgatgcccggttgcgactctacagcagaattaaaatcaagtccggcgcagccggtttgtgccgcttccacgcagttatctgcgcctaagccccccgccagcagaacgttgccaagcgattgaccatttaatagtgaccagtcaaaacgttgcccgcttccaccctggccgttgtctaaaacatatttatcaacgtgctgaaactcgcgggcgggcagggtttcaccgacgcttaatgctttccagatggcaacatgtgctggcagagcttcacgcagcgtatcgatatacagctgttcttcattaccatgcagttgcactgccgccagcgataacaccttagctttgtccaccacatcggcaatatcgtgattgcggaacacgccaacatactgcaacggtgccgcagccatcacttcctgcgcctgttcaacgttgacgcaacgcggtgatgtcgcaacaaaaatcaacccaccgtaaatcgcgcccgcgtcataagctgctttagcatcttgctcacgcgtcaggccacatactttattctcacccagcaacacccggcgcacggcggcgtgcaaatcgtcatgggccatcaacgccgaaccaatcagaaaaccgttagcgaagtggcttaactcgcgcacctgagcgtaagtattgatgccggattcgctgattaccgtcacgttgtgccccagtttcggcgcaagctcgcgggtacggttgagatcaatcgacaaatcacgcagatcgcggttgttgatgccaacgacctttgctcccaatgcaatggcgcgctcctgttcctcttcattactgacttcggtcagcacccccatctccagactgtgagcgacggcggcaagctggcgatattggtcgtcatccagtactgaaagcattaataagcaggcatcggcctggtaatagcgcgccagatagatctggtaagggtcgataatgaagtctttacataaaatcggctgcggggcgatttggctgacgatggggaggaaattaaagctcccctgaaaatatttctcatcagtcagcaccgaaattgccgaagcgtaatgtttataaatggcggcaatgcgtgctggatcgaaatcatcacggatcacgccttttgacggcgacgctttcttgcactccagaataaacgccgtgcgcgcaccctgtagcgcatcataaaaatgtcgcgtgctcggctgaacctcattctgaaaactggccagcggttgctgctgtttgcgggcttctacccaaatcgccttgtctgcgacgattttcgctaaaacggtttgcatcatttaccctcgtgccgccagtgcggtgactctgtcgtaagcggaaccactgcgcagtacctcaagaacggtttgcgcattggcttgcagatcttcatggccatgcaggcgcattaacatggcgacgttcgcagcgacggctgcttcatgggcggcgtcgcctttaccttgtaacaaacgtgttaaaatgtcacggttttcttccggtgttccgcctgccagttgctcctggtggtagggtgtcaggccaaagtcttctgcggtgagctgatagcttttaatttcgccgtcatgcagttcggcaacgattgtcggcgcgtgtaatgaaacttcatccatcccgccgctgtgcaccaccgccgcgcgttgataccccagcacgcgcaaggtttcggcaatcggcagcaccagttccggactataaacaccaattaacgccagcggcggatgcgccgggttaatcaatggccccagcacattgaacagggtgcgggttttcagttgctggcgaaccggcatcgcgtggcggaatccggtgtgatacttcggcgcaaagaggaaacatacacctaactcatccagcgcctggcgcgatttatcggcgttcatatcaagattaataccgaacgccgccagcagatcggacgaaccagatttactggagacgctacggttgccgtgtttcgccactttcagcccacaggccgcggcgacaaacgcactggcggtagaaatattgatactgttgctgccgtcaccgccagtaccgacgatatcagcaaacagataatccgggcgcgggaacggcgctgcgttttccagtagcgcggttgctgccccggcgatctcgttcgggtgctcaccgcgaattttcatgctcaccagcgccgccgccagttgttccggcttcagctcgccacgcaccaccgctgaaaacagctggtggctttcttgttggctaagcgtctgcgcctgatacagtttttccagaatcggttgcagcgtgttggctggctctagtttctgctgcgcccaggccagcgtttgttccagcaggcgagcgccctgggtggtgagaatggattccggatggaactggaatccacaaacgcgatccgcatcgtgacgtactgccatcaccatgccattaaaatgggcgttgatggttaaaccggccggaatgttactgccaaccagcgagtgataacgcgccaccggcagcgggtttgttaatccggcaaacatcgcctgaccgtcatgttcaatgctggaggctttaccgtggagaatttcgcccgcctgaccgacatagcccccgtaagcttcgacaatcgcctgatgtccgaggcaaatgccaataatgggcagcttgccacgcaagcgggtgaggagttccggcatacaaccggcttcgctcggcacaccggggccaggagaaagcatcagcaccggattgctcatggtcgccaggcgttcaattaaggtttgcgccggaatatggttgcggtaaatcaccacgttatgcccattgctgcgcaactgatctgccaggttgtacgtaaaagagtcgatattatcgagcagcagaatgtcagccatcagaaagtctcctgtgcatgatgcgcggtggcaatagcgcgcagtacagcgcgggctttgttacgggtttcgtcggcttccgactgcggaacagaatcaaggactacaccagcacccgcttgcacggtggcgataccgttttccaccagcgccgagcggatcacaatgcaggtgtcgagatcgccatgcgcggtgaaataacctaccgcgccgccgtagctgccgcggcgacgaccttccgcctcggcaattaactgcatagcgcgtactttcggcgcaccgcttaacgtccccatattcatacaggcgcgataagcgtgcagggcgtcaagatcgtgacgcagttcgccgactacgcgagagacgaggtgcatcacataggaataacggtcaactttggtgagatcggcgacgtagcggctgccgggggtgcaaatgcgtgccagatcattacgggcgagatcaaccagcatcagatgttcagacagctctttatgatcggtacgcatttccagttcaatacggctgtcgagatctctgtccagtgaaccatcggcgcgacgaccgcgtgggcgtgttccggcaatcgggtagatctcaatctggcggctggtggcatcatacttgagcgagctttccggcgacgcgccaaatagggtgaaatcattatcctgcataaaaaacatgtacgggctgggattactctttttcagcacgtaataggccgccagcggtgacgggcagggcagagagaaacggcgagatggcaccacctggaaaatttctccagcgcgaatcgctttttgcaacaaacgcactacgccaccgaactcttcatcgctctgattacattcacaacgcatatgcggcacggaaaccactggcagcggcggcgcggcttcggtcagttgctgacgtagttcgttcaggcgagcagtgagacgttgtttttcttcttcattcggagcaaacaggctggcctgaatacgggtgctttttttctgatggtcaatcaccatcagcgtttcagcgagataaaaacagaaatcagggcagttattttccgctgacagttgcggtaaatcttcaaatcccgccacaaggtcataagagaacaggccgccgaagaacatggcttctcgttcttccttcggtacattcaacagattctgcaataaacggaaagcgtcaaaaaccgaaagggagcataagcgggcgtcttcatccagcagtggactgacaggggggaagcgcagcacacggcagtttggtgattgttcactttccacacccgcaggcagggcgttatccagtagtgccagcagggcttcgccgttgccggaaagtgcctggattgtgacagtgtcacctaaagctgtaatgcgcagcgcactgtctaccagcagcaggctttttaaatcatctttgctgtcgatatctgcggattccagcagcagcgttgccggacgatccccacacaactggtgaaaaagcgcggtgggattgtcgcgataagcgccttcgcaggttagcagttcgagagtcggtttttgtgtttgcattgttattctctaattttgttcaaaaaaaagcccgctcattaggcgggctgggtatctgattgctttacgcatggtgaatacactgcccgtttcaggaagtgcgccaccaacctttcagtacgaaaattgctttcattgtcgataccctttttacgtgaactttcgtactagttaactagttcgatgattaattgtcaacagctcatttcagaatatttgccagaaccgttatgatgtcggcgcaaaaaacattatccagaacgggagtgcgccttgagcgacacgaattatgcagtgatttacgacctgcacagccataccacagcttccgatggctgcctgacgccagaagcattggtgcaccgtgcagtcgagatgcgcgtcggcaccctggcgatcaccgaccatgacaccacagctgcaatcgcgccagcaagagaggaaatttcacgttcgggactggcgttgaatcttattcccggcgtggaaatttccacggtctgggaaaatcatgaaattcatattgtcgggctgaatattgatattactcatccgctaatgtgtgagttcctcgcgcagcagacagaacggcgcaatcagcgggcgcagctgattgccgaaagacttgaaaaagcgcaaatacctggggcgctggaaggcgcacaacgactggcgcagggcggcgcagtgacgcgcggtcattttgcgcgtttccttgttgagtgcggcaaagccagttcaatggcggatgtctttaaaaagtatctggcgcgcgggaaaaccggatacgttccgccacagtggtgtacaatagaacaagctattgatgtcattcatcattctggcggtaaggcggtgctagctcatcctgggcggtacaatcttagtgctaaatggctgaaaagattggttgcgcattttgccgaacaccacggtgacgcgatggaagtcgcgcagtgccagcaatcgcccaatgaacgtacccagctggcggcccttgcgcgtcagcatcatttatgggcatcacaaggatctgattttcatcagccatgcccgtggatcgaactgggtcgtaaactctggctgcccgcaggcgttgaaggcgtctggcagctatggaaacagccgcagaacaccacagagagggaattatgagccagtttttttatattcatcctgataacccacagcaacgtctgatcaaccaggcggtggagatcgtgcgtaaaggcggggtgattgtttatccaactgattccggctatgcgctcggctgtaaaattgaagataaaaacgcgatggagcgtatttgtcgtattcgccagctgccggacggtcacaactttaccctgatgtgtcgcgatctttctgaactctcgacctattcatttgttgataacgttgcgtttcgtttaatgaaaaacaacacgccgggcaactataccttcatcctgaaggggacgaaggaagtgccacgccgtctgttgcaggaaaaacgcaaaaccatcggtatgcgtgtgccttctaaccctatcgctcaggcgttacttgaagcattgggcgaaccgatgctttccacttcgctaatgctgccaggcagcgaatttaccgaatcggacccggaagaaattaaagatcgtctggaaaaacaggtagatttgattattcacggcggctatctcgggcagaaaccgacaacggttattgatcttaccgatgatacgccggtcgtggtgcgtgaaggcgtaggtgatgtgaagcctttcttataacaaattgcgttccacggatggaagactatggcagggaagtttcgctgcattttgctgttgatagcagggctgtttgtatcatctctaagttatgcagaaaacacggagatcccttcttatgaagaagggatctcgctctttgatgttgaagccactctgcaaccagatggggtgctcgacatcaaagaaaatattcattttcaggcgcgaaatcagcagattaagcacggcttttatcgtgatttaccacgactatggatgcagcctgatggggacgctgcactgctgaactatcatattgttggcgtcacccgtgatggtattcctgaaccctggcatcttgactggcatatcgggttaatgagtattgtcgtgggcgataaacaacgtttcttgcctcaaggcgactatcattatcaaattcattatcaggttaaaaatgctttcctgcgtgagggggattctgatctgctaatctggaacgtgaccggtaaccactggccgtttgaaatttataagacccgtttttctctccagttctctaatattgcgggtaatccatttagcgaaatcgatctctttaccggagaagagggcgacacatatcgtaatggccgcatccttgaggacggaagaattgaatcccgcgatccgttttatcgtgaagatttcacggtcctctaccgctggcctcacgctttacttagcaatgcctcggctccgcaaacgacgaatattttcagccatcttcttttaccctccacgtcatcgttgttaatttggtttccgtgtctgttcctggtttgtggatggttatatctctggaagcgcaggccgcaatttacgccggtagatgtgattgaaaccgatgtcattccgccagattacacgcccggcatgttacgtctcgatgcgaagctagtttacgacgataaaggtttttgtgccgatatcgtaaatctgattgtgaaaggaaaaattcatctggaagatcagtctgacaagaaccagcaaatcctgattcgtgttaatgaaggcgcgaccagaaataatgcggtattactgcccgcagagcagttattactggaagcgttatttcgtaaaggcgataaggtcgttcttacggggagacgcaacagagtcttacgcagggcatttttacggatgcagaaattttatctgccgcgtaaaaagtcttcgttttaccggtctgatacttttttgcaatggggtggactggcaatattggcggtcattctttacggtaacttgagtcctgtaggctgggcaggaatgagtctggtgggcgatatgtttattatgatctgctggattattccttttttattttgttctcttgagcttttgtttgcccgcgatgatgacaagccttgcgttaatcgtgtaatcatcactttgtttttaccactgatttgttcaggcgtggccttctattctctctacatcaatgtcggagatgtattcttttactggtatatgccagcgggttattttaccgctgtttgcctgaccggttatctcactggcatggggtatatttttctgccaaagtttacccaaactggacagcaacgttatgcccacggtgaagctatcgttaactatcttgcgcgtaaagaggcagcaacacacagtggacgtcggcggaaaggggaaacacggaaactggattacgcgttgctaggttgggctatatcggcaaatttggggagggaatgggcgttacgcattgccccttcgctttcttcggcgattcgcgctccagagattgcccgtaacggcgttttattctcattacagacgcacctaagttgcggggccaataccagtttgttggggcgaagttattccggtggtggtgctggcggcggcgcgggtggcggaggcggtggtggctggtaattaagctgatgttaatcgaaacaagctttaaccataaagatagtgtagtatgttgcgcctcaaagccaggccgataaacgtcgagtcgtttacttaaggcctgaagagttcaaacagactttactatcagtgagtcagatgtaagttctgactcactgttgcacaaaagcatatcagacgcctgggaaggcgacaccaaaaggaagctctatgagcgaaaagctacagaaagtgctggcgcgtgccggccacggttctcgccgtgaaatcgaatctattattgaagccggtcgtgtgagtgttgatggcaaaattgctaaactcggcgatcgtgttgaagttacccctggattgaaaatccgtatcgatggtcacctgatttcggtacgtgagtccgctgaacaaatttgtcgcgttctggcctattacaaaccggaaggtgagttgtgtacccgtaacgatccggaaggacgtccaacggtgtttgaccgtctgccaaaactgcgtggcgcacgctggattgccgtgggtcgcttggacgttaatacctgtggtctgctgctgttcaccaccgatggtgaactggcaaaccgtttaatgcacccaagccgtgaagttgaacgtgaatatgccgtgcgtgtatttggtcaggttgacgacgcgaaactgcgtgatttgagtcgtggcgtgcagttggaagatggtccggcagcttttaaaaccatcaagttcagcggcggcgaagggatcaaccagtggtacaacgtgactctgaccgaaggccgtaaccgtgaagttcgtcgtctgtgggaagcggttggtgtgcaggtgagccgcctgatccgtgttcgttacggtgatatcccactgccaaaaggtctgccacgcggtggctggacggagctggacctcgcccagactaactatctgcgcgaactggtggagctaccgccagaaaccagctctaaagtcgctgtagaaaaagaccgtcgtcgcatgaaggcgaatcagattcgtcgtgcggtgaaacgtcacagtcaggtgagcggcggtcgtcgttctggcggacgtaataataacggttaatcaaagtatgccggacgtcatatccggcatttttacagattaataatcgatccctatctgcgcttttacaccggcatcaaacgcatgtttgacggggcgtaattcacttaccgtatctgccagttcaagaatatcccgatgacaaccacgacccgtgataatcaccgtctgttgatgtggacgttcatttaacgcctgcaccacttcttccagtggcaaatagtcatacgccaccatatacgtcagttcatcaagcaaaaccatatccagtgaggaatcagcaagcatccgctttgcatgttgccagacttcgcggcaggcggcggtatcagactcgcggttttgtgtatcccaggtaaagcccgttgccatcacctgaaactcaacgccatgtggctccagcagattgcgttcgccattaggccaggtgcctttaataaactgcacgacgcctactttttttccgtgaccaactgcgcgtgttgccgtaccaaatgccgcggtggttttgccttttccattgccggtaaagacgatgataataccgcgttcatcctgggcctgggccacacgagcatctactttttctttcactcgctgctgacgctgttggtagcgttcatcactcattgggaaattcctggtttacggcccggttgggcgtcaaaggtcatgccggttttacggcggctgtcatcgcccatcagccagaggtagagcggcatgatatcagcgggtgttttaagtttctgtggatcttcggtcgggaaggcgctggcacgcattgcggtgcgcgtaccgcctgggttaatgcagttgacacgcaggcgctgctgatattcatcggccagtacctgcatcatcccttcggtggcaaatttcgacgctgcatatgcaccccagttggctcgtccctgacgtccaacgcttgatgaagtaaagaccagtgaaccggcgtccgatttgagtaataaaggaagcagtgcctgggtgagcataaaggtggcattaacgttgacctgcatgacgtcctgccagacctgcggattttgttcgctcattgggcaaacatcgccgagcaatccggcattatgcaaaacaccatccagacgcggataattaacggcaatgcgctgtgccagttgttggcaattttcggacgtgcaggtcagcaaatcgagaataaaccactgtggctgacgcccagtttcttcgtttatgtggctggctacctgacgtaatttttcttcattacggcccaacagaatcactgtcgcaccatagcgtgcatacgtcatcgcggcttcacgaccaataccatcgctggctcccgtcaccaggataatgcgatcattgagtaaatcttgttttggctggtaatgcatggctactcctcaacgacgttgtctgtcgcgctgccagtgtactttatgactttggggctttatgcctgaaacagaagggcatttcaatcagcctggggcgataacaccgcaaaatggatactttgtcatactttcgctgcaataacatctctgcgagacggcttaacatgcctgttgtaaactgtgagccaaagcgttgtttaaccaaggtggggactcgtggaattgttgtctgaatatggtttgtttttggcgaaaatcgttaccgttgtgctagcgattgcggcgattgccgccattattgtcaatgttgctcaacgtaataaacgccagcgtggcgagttacgggtcaacaatctcagcgaacagtataaggagatgaaagaagaactggccgcggcgctgatggactcacatcagcaaaaacagtggcacaaagcgcagaagaaaaagcataagcaagaagcgaaagcagcaaaagcgaaagccaaactgggcgaggtggcaactgacagtaaaccccgcgtctgggtgctggattttaaaggcagcatggacgcccatgaagtgaactcgctacgtgaagagataacggctgtactcgcagcattcaaaccgcaggatcaggttgtgctccgtctggaaagccctggtggcatggtgcatggttacgggctggcggcttcgcaactgcagcgtctgcgcgataaaaacattcctttaactgttacggtagacaaagtcgctgccagcggcggttacatgatggcctgtgtggcggacaaaattgtttccgcaccgtttgctattgtgggttccattggcgtggtggcgcaaatgcccaactttaaccgcttcctgaaaagcaaagatattgatatcgaactgcacactgccgggcagtataagcgcacgctgacgttgctgggtgaaaataccgaagaagggcgggagaaattccgcgaagagttgaacgaaacgcatcagttgtttaaagattttgtgaagcgtatgcgtccttctctggatattgaacaggtggcaacgggtgaacactggtacggacaacaggcggtagagaaaggcctggttgatgaaatcaacaccagtgatgaagttattcttagcctgatggaaggccgtgaagtggtcaatgtacgctatatgcagcgtaaacgactcattgaccgattcaccggcagcgcggcagagagcgccgatcgattgttgctacgctggtggcagcggggtcaaaagccattgatgtaaaagacaaacgcgaggctaagacctcgcgttttgctttaatcaaccagatgatatttttctgaaagcacatgggccaggtgtttgaacatattaaacaccgcggtgcttttggctgttggcaatccttgttcatctaaaaagtagtcgccggtaaataccagcacgccattacgctgcgtgacgccggtggcttcaatccctgcgagcgtatcctcatgctcacgaatgattttgttggcctctttcaacagcgtttcgcggtcgatgggttgtgtctctttgttcattatttactccttaaacaaggacattagtctacgccaggcatggcttgcagacaaatataccacgctggtggcaagagcgccttactggcaactttggattttgcatgctaataaagttgcgtatcggattttatcaggtacagtgtgacgctttcgtcaatctggcaatagatttgcttgacattcgaccaaaattccgtcgtgctatagcgcctgtaggccaagacctgttaactcagtcacctgaattttcgtgaacagagtcacgacaaggggttgatatccgcagagagcgagtccatatcggtaactcgttgccagtggaaggtttatcaacgtgcgacgcattcctggaagaatcaaattaggtaaggtgaatatgggtaaagctcttgtcatcgttgagtccccggcaaaagccaaaacgatcaacaagtatctgggtagtgactacgtggtgaaatccagcgtcggtcacatccgcgatttgccgaccagtggctcagctgccaaaaagagtgccgactctacctccaccaagacggctaaaaagcctaaaaaggatgaacgtggcgctctcgtcaaccgtatgggggttgacccgtggcacaattgggaggcgcactatgaagtgttgcctggtaaagagaaggtcgtctctgaactgaaacaactggctgaaaaagccgaccacatctatctcgcaaccgaccttgaccgcgaaggggaagccattgcatggcacctgcgggaagtgattgggggtgatgatgcgcgctatagccgagtggtgtttaacgaaattactaaaaacgcgatccgccaggcatttaacaaaccgggtgagctgaatattgatcgtgttaatgcccagcaggcgcgtcgctttatggaccgcgtggtggggtatatggtttcgccgctgctatggaaaaagatcgctcgtggtctgtctgccggtcgtgtgcagtcggtggcggttcgcctggtggtcgagcgtgaacgtgaaattaaagcgttcgtgccggaagagttctgggaagtcgatgccagcacgaccacgccatctggtgaagcgttggcgttacaggtgactcatcagaacgacaaaccgttccgtccggtcaacaaagaacaaactcaggctgcggtaagtctgctggaaaaagcgcgctacagcgtgctggaacgtgaagacaaaccgacaaccagtaaacctggcgctccttttattacctctacgctgcaacaagctgccagcacccgtcttggatttggcgtgaaaaaaaccatgatgatggcgcagcgtttgtatgaagcaggctatatcacttacatgcgtaccgactccactaacctgagtcaggacgcggtaaatatggttcgcggttatatcagcgataattttggtaagaaatatctgccggaaagtccgaatcagtacgccagcaaagaaaactcacaggaagcgcacgaagcgattcgtccttctgacgtcaatgtgatggcggaatcgctgaaggatatggaagcagatgcgcagaaactgtaccagttaatctggcgtcagttcgttgcctgccagatgaccccagcgaaatatgactccacgacgctgaccgttggtgcgggcgatttccgcctgaaagcacgcggtcgtattttgcgttttgatggctggacaaaagtgatgcctgcgttgcgtaaaggcgatgaagatcgcatcttaccagcagttaataaaggcgatgctctgacgctcgttgaacttacaccagcccagcactttaccaagccgccagcccgtttcagtgaagcatcgctggttaaagagctggaaaaacgcggtatcggtcgtccgtctacctatgcgtcgatcatttcgaccattcaggatcgtggctacgtgcgagtagaaaatcgtcgtttctatgcggaaaaaatgggcgaaatcgtcaccgatcgccttgaagaaaatttccgcgagttaatgaactacgactttaccgcgcagatggaaaacagcctcgaccaggtggcaaatcacgaagcagagtggaaagctgtactggatcacttcttctcggatttcacccagcagttagataaagctgaaaaagatccggaagagggtggtatgcgcccgaaccagatggttctgaccagcattgactgcccgacttgtggtcgcaaaatggggattcgcacagcgagcaccggggtattccttggctgttctggctatgcgctgccgccgaaagagcgttgcaaaaccaccattaacctggtgccggaaaacgaagtgctgaacgtgctggaaggcgaagatgctgaaaccaacgcgctgcgcgcaaaacgtcgttgcccgaaatgcggcacggcgatggacagctatctcatcgatccgaaacgtaagttgcatgtctgtggtaataacccaacctgcgacggttacgagatcgaagagggcgaattccgcattaaaggttatgacggcccgatcgttgagtgtgaaaaatgtggctctgaaatgcacctgaaaatggggcgtttcggtaaatacatggcctgcaccaacgaagagtgtaaaaacacacgtaagattttacgtaacggcgaagtggcaccaccgaaagaagatccggtgccattacctgagctgccgtgcgaaaaatcagatgcttatttcgtgctgcgtgacggtgctgccggtgtattcctggctgccaacactttcccgaaatcgcgtgaaacgcgtgcgccactggtggaagagctttatcgcttccgcgaccgtctgccggaaaaactgcgttatctggccgatgcgccacagcaggatccggaaggtaataagaccatggttcgctttagccgtaaaaccaaacagcaatatgtctcttcggaaaaagacggaaaggcgactggctggtcagcattttatgttgatggcaaatgggttgaaggaaaaaaataacctttaattctgtcaggtttttataaacaaagggtcgcgaaagcggcccttttttattgcatattattttttcttcacacctatacactaaggctataaatgatatagtggttatagttagcaccttttttattattaaatcgtattagtcacccgccaggtgtgacgaaaaaacgatgttctgatggcgtctaagtggatggtttaacatgaaattacaacaacttcgctatattgttgaggtggtcaatcataacctgaatgtctcatcaacagcggaaggactttacacatcacaacccgggatcagtaaacaagtcagaatgctggaagacgagctaggcattcaaattttttcccgaagcggcaagcacctgacgcaggtaacgccagcagggcaagaaataattcgtatcgctcgcgaagtcctgtcgaaagtcgatgccataaaatcggttgccggagagcacacctggccggataaaggttcactgtatatcgccaccacgcatacccaggcacgctacgcattaccaaacgtcatcaaaggctttattgagcgttatcctcgcgtttctttgcatatgcaccagggctcgccgacacaaattgctgatgccgtctctaaaggcaatgctgatttcgctatcgccacagaagcgctgcatctgtatgaagatttagtgatgttaccgtgctaccactggaatcgggctattgtagtcactccggatcacccgctggcaggcaaaaaagccattaccattgaagaactggcgcaatatccgttggtgacatataccttcggctttaccggacgttcagaactggatactgcctttaatcgcgcagggttaacgccgcgtatcgttttcacggcaacggatgctgacgtcattaaaacttacgtccggttagggctgggggtaggggtcattgccagcatggcggtggatccggtcgccgatcccgaccttgtgcgtgttgatgctcacgatatcttcagccacagtacaaccaaaattggttttcgccgtagtactttcttgcgcagttatatgtatgatttcattcagcgttttgcaccgcatttaacgcgtgatgtcgttgatgcggctgtcgcattgcgctctaatgaagaaattgaggtcatgtttaaagatataaaactgccggaaaaataatttcttgcgttattttcggcaccttttatgtagcgaaggtgccggaatatattctcttttgttacttatttctataccgtgcacaatatttttatccctcatatttatagggtaaattacctgtaaagtagtgtctaattacccgcctcgcaaactccagttttcaaatatctatttcaggtcaaaagattgaattattcactggagacgattcgtaaattcgctggatttttgactaaagtttctttaggatttgtctcatcgtatgattaattacaccaatcgttcaacgtcttgctgataagtgatggcgattatatgaggttagcaatgccttctggaaatcaggaaccccgccgcgatcctgaattaaaacgtaaagcctggctggcggtttttcttggttctgcacttttctgggtggttgtcgcactgctgatttggaaagtgtggggataactatggtcggtcaggagcaactggagtcgtcaccattatgccagcatagtgacaatgaaacagaaacgaaacgggaatgttccgtcgttattccagacgactggcaactaacatcgcagcagcaagcctttatagaactgtttgctgaagatgatcagccgaaacaataattatcatcattcttattacccatttttaatgaattaaagggcttttaatacaccgcagcaataacagcttgagttatctcaacacaaaataataaccgttaagggtgtagcctatgatcaacacaaatatgaaatattggtcctggatgggcgcgttttctctgtcgatgctcttctgggccgaactcctctggatcattactcactgatccttgaccccgctgcggcggggttgtcatttgctttgccacaaggtttctcctcttttatcaatttgggttgttatcaaatcgttacgcgatgtttgtgttatctttaatattcaccctgaagagaatcagggcttcgcaaccctgtcattaaggaggagctatgtcgtcaaccctacgagaagccagtaaggacacgttgcaggccaaagataaaacttaccactactacagcctgccgcttgctgctaaatcactgggcgatatcacccgtctacccaagtcactcaaagttttgctcgaaaacctgctgcgctggcaggatggtaactcggttaccgaagaggatatccacgcgctggcaggatggctgaaaaatgcccatgctgaccgtgaaattgcctaccgcccggcaagggtgctgatgcaggactttaccggcgtacctgccgttgttgatctggcggcaatgcgcgaagcggttaaacgcctcggcggcgatactgcaaaggttaacccgctctcaccggtcgacctggtcattgaccactcggtgaccgtcgatcgttttggtgatgatgaggcatttgaagaaaacgtacgcctggaaatggagcgcaaccacgaacgttatgtgttcctgaaatggggaaagcaagcgttcagtcggtttagcgtcgtgccgccaggcacaggcatttgccatcaggttaacctcgaatatctcggcaaagcagtgtggagtgaattgcaggacggtgaatggattgcttatccggatacactcgttggtactgactcgcacaccaccatgatcaacggccttggcgtgctggggtggggcgttggtgggatcgaagcagaagccgcaatgttaggccagccggtttccatgcttatcccggatgtagtgggcttcaaacttaccggaaaattacgtgaaggtattaccgccacagacctggttctcactgttacccaaatgctgcgcaaacatggcgtggtggggaaattcgtcgaattttatggtgatggtctggattcactaccgttggcggatcgcgccaccattgccaatatgtcgccagaatatggtgccacctgtggcttcttcccaatcgatgctgtaaccctcgattacatgcgtttaagcgggcgcagcgaagatcaggtcgagttggtcgaaaaatatgccaaagcgcagggcatgtggcgtaacccgggcgatgaaccaatttttaccagtacgttagaactggatatgaatgacgttgaagcgagcctggcagggcctaaacgcccacaggatcgcgttgcactgcccgatgtaccaaaagcatttgccgccagtaacgaactggaagtgaatgccacgcataaagatcgccagccggtcgattatgttatgaacggacatcagtatcagttacctgatggcgctgtggtcattgctgcgataacctcgtgcaccaacacctctaacccaagtgtgctgatggccgcaggcttgctggcgaaaaaagccgtaactctgggcctcaagcggcaaccatgggtcaaagcgtcgctggcaccgggttcgaaagtcgtttctgattatctggcaaaagcgaaactgacaccgtatctcgacgaactggggtttaaccttgtgggatacggttgtaccacctgtattggtaactctgggccgctgcccgatcctatcgaaacggcaatcaaaaaaggcgatttaaccgtcggtgcggtgctgtccggcaaccgtaactttgaaggccgtatccatccgctggttaaaactaactggctggcctcgccgccgctggtggttgcctatgcgctggcgggaaatatgaatatcaacctggcttctgagcctatcggccatgatcgcaaaggcgatccggtttatctgaaagatatctggccatcggcacaagaaattgcccgtgcggtagaacaagtctccacagaaatgttccgcaaagagtacgcagaagtttttgaaggtacagcagagtggaagggaattaacgtcacacgatccgatacctacggttggcaggaggactcaacctatattcgcttatcgcctttctttgatgaaatgcaggcaacaccagcaccagtggaagatattcacggtgcgcggatcctcgcaatgctgggggattcagtcaccactgaccatatctctccggcgggcagtattaagcccgacagcccagcgggtcgatatctacaaggtcggggtgttgagcgaaaagactttaactcctacggttcgcggcgtggtaaccatgaagtgatgatgcgcggcaccttcgccaatattcgcatccgtaatgaaatggtgcctggcgttgaaggggggatgacgcggcatttacctgacagcgacgtagtctctatttatgatgctgcgatgcgctataagcaggagcaaacgccgctggcggtgattgccgggaaagagtatggatcaggctccagtcgtgactgggcggcaaaaggtccgcgtctgcttggtattcgtgtggtgattgccgaatcgtttgaacgaattcaccgttcgaatttaattggcatgggcatcctgccgctggaatttccgcaaggcgtaacgcgtaaaacgttagggctaaccggggaagagaagattgatattggcgatctgcaaaacctacaacccggcgcgacggttccggtgacgcttacgcgcgcggatggtagccaggaagtcgtaccctgccgttgtcgtatcgacaccgcgacggagttgacctactaccagaacgacggcattttgcattatgtcattcgtaatatgttgaagtaacaactatttgcttgccggttattttgcttccggcaagcaaatgaattacacaatgcaagagggttatttgttcagcaaatggcccattttctcggctttggtatcgagataatgttcgttattggggttacgacctacaatcaatggtacgcgttcaacaatattaatccctgcttcggtcagaatttcgacttttttcgggttattggttaacaagcggacttcattgacgccaaggagtttgaacatatcagcgcaaagagtgaagtcgcgctcatcagcggcgaagcctaactggtggttagcctctacggtatcgtaaccttgatcctgcagtgcgtaagcgcggattttattcagcagaccaatgttacgaccttcctgacggtgatacagcaaaataccacggccttcctcggcaatttgcgtcaatgccgcttcgagctggaagccacaatcgcagcgcaagctgaacagggcgtcaccggtcagacattcggaatggacgcgcgcaagtaccggggtatgcccggaaatatcgccatagactagcgcgacatgatcgtgtccggttgccagttcttcaaatcccaccatcaggaaatcgccccatggggttggcagtttggcttctgccacacgtttaagctgcatgaaattctccagataatgctggttctgtattggcttattttgccataacgagaaggggttcacctaatcacgacgcgtcgatcgttcacggaatggcacaaatctgtcaatttttcctggaactggcgttttcagttatgattgtgggacttatcaaaaaggagaggccatgcgttcgattgccagacgtaccgcagtgggagctgcactattgcttgtcatgccagtagccgtatggatttctggctggcgttggcaacctggagaacaaagttggctactaaaagcggctttttgggttactgaaactgtcacccagccctggggcgtcattacacatttgattttattcggctggtttctctggtgtctgcgttttcgcattaaggctgcctttgtattatttgccattctggcggccgcaatccttgtgggacaaggcgttaaatcctggatcaaagacaaagtccaggaaccacgaccttttgttatctggctggaaaaaacacatcatattccggttgatgagttctacactttaaagcgagcagaacgcggaaatctagtgaaagaacagttggctgaagagaaaaatatcccacaatatttgcgttcacactggcagaaagagacggggtttgcctttccttccggtcacacgatgtttgctgccagttgggcactgctggccgttggtttgctgtggccgcgtcggcgaacgttaaccattgctatcttgctggtctgggcaacgggagtcatgggaagccgcctgctgctcgggatgcattggccacgcgatctggtagtagctacgttgatttcgtgggcgctggtggcggtggcaacgtggcttgcgcaacgaatttgtgggccattaacaccacctgcggaagaaaatcgcgaaatagcgcaacgagaacaagaaagttaacgctggttgattttccgaatttagcccttaaatcatcaacaatgcgtgtggatgccatttcgcagacggcgcgaaaatggtactttaaagggctattccggtaagttgaccataatttattcgctctaaccacataacgggaagtaatgtgaaatatttactcattttcttactggtgttagcgatcttcgtgatttcggtcacgttgggtgcgcagaacgatcaacaggtgacgtttaattatctgttagcgcaaggggagtaccgtatttccacattgctggcggtattgtttgctgcggggtttgctatcggttggttgatttgtggcctgttctggctgcgagttcgtgtttccctggcgcgtgctgaacgtaaaataaagcgactggaaaaccagctttcacccgcgactgacgtggctgtagtgccgcactcgtcagcggcgaaggaataactttctatgctggagttgttgtttctgcttttgcctgtagccgctgcctatggctggtatatgggccgcagaagtgcgcaacaaaacaagcaagatgaagccaaccgcttgtcgcgtgattacgtagcgggggttaacttcctgcttagtaatcaacaggataaagcggtagacctgtttctcgatatgcttaaagaggatacaggcaccgttgaagcccaccttacgctcggaaacctgttccgttcgcgtggcgaagttgatcgcgctattcgcatccatcagaccctaatggaaagcgcctcgctgacctatgaacagcgtctgttggcgattcaacaactggggcgtgattacatggccgccgggttatatgaccgcgcggaagacatgttcaatcagctgaccgatgaaactgacttccgcattggcgcgctgcaacagttgctacaaatctaccaggctaccagtgagtggcagaaagcaattgatgttgccgaacgcctggtgaagctgggtaaagataaacagcgcgtcgaaattgcccatttctactgtgagttagccctgcagcatatggccagcgacgatctcgatcgtgccatgaccttgctaaaaaaaggggcggcggcagataaaaacagcgcccgcgtatccataatgatgggacgcgtgtttatggcgaaaggagaatacgccaaagccgtcgaaagtctgcaacgcgtgatatcccaggacagagaactggtcagcgaaacgctggaaatgttgcaaacctgctatcagcagttgggtaaaactgccgaatgggcagaattcctgcagcgtgcggtggaagagaacaccggtgccgatgctgaattgatgcttgctgatatcatcgaagcgcgcgacggtagtgaggccgcacaggtctatattacgcgccagcttcagcgtcatccgaccatgcgtgtgttccataagttaatggattaccacttaaatgaagcggaagaagggcgtgccaaagagagcctgatggtgctgcgtgacatggttggcgagaaggtacgtagtaagcctcgttatcgttgccagaaatgtggttttaccgcatacaccctctactggcattgtccgtcttgtcgggcctggtcaaccattaaaccgattcgcggtcttgatggcctgtaatttttaaaaaaaatccgactttagttacaacatactaattattaatgttccattgtgctccggcaacgacggcgcagaaaaagcctgccaggggagaaatcgcaactgttaattttttatttccacgggtagaatgctcgccgtttacctgtttcgcgccacttccggtgcccatcatcaagaaggtctggtcatgacgttaactgcttcatcttcttcccgcgctgttacgaattctcctgtggttgttgcccttgattatcataatcgtgatgacgcgctggcctttgtcgacaagatcgacccacgcgattgtcgtctgaaggtcggcaaagagatgtttacattgtttgggccacagtttgtgcgcgaacttcaacagcgtggttttgatatctttcttgacctgaaattccacgatatccccaacactgcagcgcacgctgtcgctgctgcagctgacttaggcgtgtggatggtgaatgttcatgcctctggtggggcgcgtatgatgaccgcagcgcgtgaggcactggttccgtttggcaaagatgcaccgcttttgattgctgtgacagtgttgaccagcatggaagccagcgacctggtcgatcttggcatgacactgtcacctgcagattatgcagaacgtctggcggcactgacgcaaaaatgtggccttgatggtgtggtgtgttctgctcaggaagctgtgcgctttaaacaggtattcggtcaggagttcaaactggttacgccgggcattcgtccgcaggggagtgaagctggtgaccagcgccgcattatgacgccagaacaggcgttgtcggctggtgttgattatatggtgattggtcgcccggtaacgcaatcggtagatccagcgcagacgctgaaagcgatcaacgcctctttacagcggagtgcatgatgagtgattccaacagccgtctggtctactcaacggaaaccggacgtattgatgagcccaaagcggcccctgtacgccctaaaggcgacggtgtggtgcgtattcagcgtcagaccagtggacgtaaaggtaagggcgtttgcctgattaccggtgtcgatctcgatgatgccgaactgacaaaacttgcagcggaactgaagaaaaaatgcggctgcggcggagcagttaaagatggagttattgaaatccagggcgataagcgtgatttattaaaatcactacttgaagcgaaagggatgaaggtaaaactcgcaggcggttaacataaaaagccacggatatatccgtggctttcgaatattttactgtgcgtattattcagttatttcgtactgaacagaatcaagcgtattataattgcgagtcgataatcgacatttatttacgattatttaccgacctggtgaccaataacaccaccgacagctgcaccacctaatgtacccaacgtactgccatcggtcagtactgcaccgcctaatgcccctgcacccgcgccgattgcggtgttgcggtcccgtttagaccagttagaacaggcactcagagacattgccaaagtaattgccagaacagccgcggtcatttttttgctcgttacaaacataatactctctcctgaatttatgattcacggaagtaagctctctataactataatagctaagaataagcctggtgaaattattccgtgaaatctgctcgcgcgcagggttatatcacgcaggtgataatgacttcctgttatatcgctgataataattttatatcttgagagtgttaataacaggtaaatagtcttaattatcaaccaggaatcatcttagagcggatgatttgccaaactgcaaatcatccgtagagaagggaaatggttaaatgtcaacgacgtgaacggtgagtttactgtgctcaagatgcatcagatcgctggcgcgtattttcgaatcggtaatcacgcgattgaatcgctcaacgggaccgatggagtatgaatgtacagcaccaaatttcgagctgtcagtcaggactatcgcttcgcactctttttccagcacggcattgaccacatcggtacgcatcatatcgcgaccggtaaatccagtttcaggttgccagccatcaataccaataaatgctttgctgaaatgcacctgttggatgcactggcgtgtcaaagggccaaccatactttcgctttttttctgatacacgccaccgagcaaaataacttcacaaggcgcgtctttcagcaaatgcgcgatgtagctgctgaccgtgatgatagtgacatttttcttctgctcgcccagagtccgggcgagtagggcattgctgctgccattttcgataaagatggtttcgcccggttgaaccagcgacgcggcaaactcggcgagttcacgcttcagcgtatagttgctcatcatacgggtttcgacgtcatcactatcaagcgaaacagcaaagccatgtgcacggcggaggtaactcagtttttcgagtgtgttgagatcctggcgaatggtaacttcagaaactccagtggcttttgccagatcggttacgctaacctgaccctggtcaatgaccatctgtagaatagtttgttgtcgggaattcatcgctgtaattcttataacgttataatacttaataaaaaaatactgacgcgccgggcatcctcaaataggaaaacctgaaggcacgattgttaaatctcccacggtgccttcgggatgtctggcgtagattcagcaacctggcgcaagagttctgctttaagtatctcgagattatggatcgcagagtggtaatcgcctgccacaaggatatctaacacaatatcaatacgttcggcaacgcgctgggcatcaaattcagacatcaaggacatccttatagcaaaagggggaaaatgaataatgcaaaaattgccgctaaaagagaagtgtttaacagcaacggctaattatcatccaggaatacgatatataatgacgggatatagcgctaagtatatatattcatctacttatgcgcgcttcagatagcgtttataccagcgttcgaaggcgacggcgggcatcggtttggcaaacaaaaatccttgccgctcattgatcccgttcttggttaaaaaagcatcttcctttgcactctctacaccttcggcgatcacctgaagattcaatgcctgggccacagcgacgatcgcccggaccagtgactgcgagacaggttgtttgtgaatatctcgaacaaaaacctggtcaagtttgatggcatcgatcggaaagcgcgccagttgcgaaagtgaagagtagccggtaccaaaatcatccagatgcacttgcgcacctagttggctaaattgttgaataacagacagtgccagttcatcattctcaatcagacaactctctgtcagttcaacatctatagggcagtattcaaaattgagttcctggagaacctgtttcagggcggtgaaaatggtttgatcggcgagctgacgtgcagaaatatttaccgccactcgcaggtttatgcctttatcccgccactttgccacctggcgtacgacatcgagaatcacccaacggcctaaaggcacaattagccctgactcttcggcgtaggaaatgaagtccaacggtggaatcaacccacgttcaggtgactgccaacgtactagtgcttccagactgcgcacttcgccacgccaggtgattttcggttgatagtgaataaccaactgatcgttttccagtgctttacgcaagttggtatccagccagagatattcaaatacccgttgattcatttctggggtaaaaacgcaaaattgtcctcgtccgccttccttcgctgtgtacattgctgtgtcggcgtgacgaataatagccgtgctgtctgaaccatgttcgggagagagtgcaatacctactgaacagctggtataaacttcaattaaaccaatgcgaaaggggagccgtaagcgggtcaaaattcgtgatgccattgcttccagcgcgctttgtgaggtgttggatgccagtaccagaaactcatccccacctggacgcgccaacacctggtcatgttcgagacagcttaaaatagccaatgacacgtcgcgtaataactggtcaccaaacaaatgcccataggcgtcgttgacctttttgaaattatccaaatcaagatacacaaccccaactttattgttatctgcatgattaatagcgtgatcgattaaatcctgcattgcgttacgattcggcagtccggtgatactgtcggtatttgccagaatacgcagtcgctcctgagcgcggcgctcttcggtaatgtcggtgccggaacagattaaaaaaatctcgtttttgccactgccgctgtggacaaatttattgcgaaacagaaacagccgctggcctttacatgttggtatccacagttcgacttcatatgcattgccgcttcgaaaaaatacacggttattgcgcctggatgccgcagcttcacgacggctcataaacagtttaaacacgctttgcccaatgacgtcgtgttctttcaaccctgtgtaatcttcacataaccgattgaagcgttggatattcccccggctgtcgagaatcactattgcggaatgtgcttcagaaactacctgctcagcaaaggaaagcccgtgtgataaatcacgagcaaccgccggtgtgtcatgccatgcagacgcgttgccagcccattcccgtttattgatttttcgtcctaccagatgcacagaaagatcgctttcatcgacggtcagactcatcatcaggctggaggtgatgaccgtcatttccctgatgcgagcagcctgttcggcagataactgcaatgtacgatcaggttctgtggtttcggtggtagaaaagcgcaaaacatcgctgctttccgtcaaccgccagtatggattgtgcgatccgagaaagttgtacaacgttgtggactccctaacggttttcatgatgcatatcctccggttaacagcggagtccgcggttaaataaaaggaacaacatgacttacatgaaattaacggcggctaaacgcattgttttttttatatatttatttgtaatccagttttggaaaaacgccagttttcaaacgaaagtcagttaaaaaatctgcctggatataacgaaggtagagcggggaaataaacggcccatccatgaggaatgggccgtgaaaggagattacgcgaccgggcgcgcaataatgctgcgggtttccatgcggacttcggcaatagtgacgtcaataacgtcagtcactttgtaaaccgtttcacctttaatttgtacagtgccgttttcctggctgcaaaccagttcatcgcgcacagcgtgtaagaaaggtgccggaataaaggcgatagcgccgttatcaaccaaacgaacacgcatgccgccacggctgatatcgacaatttccgctgcgaaacgggtgtcggtcccggctttgtctttcaggaagcgtgcgtataaccagtcaccaacatcacgttctgccatccggttgagacggcgacgctcggccatttggacagtgatttcatcctgtgggcgcgtcgcagtttcgcctttgataaccgctttcagcagacggtggttgatcatgtcgccatatttacggatcggcgaagtccaggtggcgtatgcttccagaccgaggccaaagtgaggaccgggttcagtgctaatttcagcaaatgactggaagcgacgaatgcggctgtcgaggaaaccagttggttgcgcgtccagttcacgacgcagtttgcagaaaccgtccagcgtgagcacttcttcggcatcgacatgcagaccgtgcgttttcagcaacgctgccagcgcgtcggcattcgccggatcaaagcccatatgcacgttatagatgccaaaaccgagcttatcgcgcagtacgcgggccgcacaaatgttagcggcaatcatcgcttcttcgacgatacggttggcaatgcgacgaggctcggcgacgatatccagcacttcacctttttcaccgagaataaagcggtaatccgggcgatctttaaacaccagtgcgtggttatgacgccactcgccgcggcgttggcaaatttgcgctagcaaacggacttgttcggcaattgcttcactttcaggctgccagtcaccggtattttccagccagtcagaaacctggtcatacaccagctttgctttggattcgatggtggcggcaaagaattcgatattatcttcaatggtgccatcagcggagagcgtcatgcggcatgccagtaccgggcggacttcattggcgcgcagtgagcagagatcgtcagaaagctcgcgaggcagcatagggatgttgaagccaggcagatagttggtgaatgcgcgaattttcgcggctttgtccagcttgctgccttcagcaatccacgcggttggatcggcaatcgccacaatcagctgaagtttgtcatccggcaacgccttagcgaaaagggcgtcatccatatcttctgtgctggcactgtcgatggtgacaaaatccagcgcggtcagatcttcacgaaccagaccttcatcgagcatttcggtagcgacgccgtctggtgcttctttttccagattatggcgtgcaagggtaacccaccacggtacaaagtgatcgtcaccaaaagtgatgtattgtgtcagttctgcatagaaagaacgatcgcctttcagcggatgacggcgcatttcggcaaccgcccagtcgccttctttaaactcgtggttcaggccacgggctgcgcggcaaggaatggcgtcttttaagagtggatgatcaggaacgatggccagacggtcatttttgccctgaaccttacccacgaaacgagtcaggaacggttcaaccagttcttctggctctgcggattcacgttctttttcactgtggatcaccgcgataattcggtcgccatgcatgacttttttcatctgcggcggcggaatgaaataacttttttgcgcgtcgacttccaggaagccaaagcctttttctgtggcttttaccaccccttcagcgcgtggcgtctgggaatgcagttgctgtttaagctgcgctagcagcgggttgtcctgaaacataattgtctattttggtggccattagagcggctgacagttttacgcgaatctgtctgacgcggcaaggttaatatgtctcacccaacgcgatttttaagcgatttatccagccacacagcccgctccataccagcagattaataatctgcgttgatgatttttcgtgttcgagtaaagggctgaactgggcggcgctaaagcgatcgggtgctcgggtcagccattgtatcgcctgaacggtagcgcgctcaacagaatgacggtcagcccattggttaatttcattttcgcccttgcgcatatgggtgctgatttttttatattcatttgatgaatccatacaggtggcaaaacaagcaggactgccatttatacgcgcgcataacaacgccgcaagctgattatccggctgtgtattgccccgtgtgctgtttaacaacttttcgagaagggaaagtgaaatagggtggagagagagtatttcggccagttggcaaagttctgcagttgaactttttgtgtgctcttcaggtagtttttccacctcatagctgcttcgccagcgtaatgattcatcagcaaacagtgacgcgtcggcgtagttttgtatctccagcccgggtaaccagcgtaccggatgcccgagataagcctgaaatgtcgcaattgtccgcgcctgaaagccaataaaaccaatgatttggctaatgatcacacagtcccaggcagtaagaccgacgtcattcagatgctggcgcgatcggttgtcgataatagaaggcgagctagccagttggcgggcatattgcgtgatttgtgccaaccgatgattactttccctggtggaatcaggcccggggagcggcgtaagtcgcgccgaatagtagttacataaccgctggacgccgcaaacctgagcaaccgtcagggccgtcgacaagcgttcataagcggtgaaggtctgtgaacgggtcacggtaagctggtcagggaacaaatccactgcaagaacacgcgcagggtccagccatgaaaggaagggggccagcgtttctttttcaaggatcacgtcgagtagaaagggatcgctgacctttgcggcttccgggaccagaggcagaacgtcatactccgtagtactggattgcgtttcatgataccagtggcttttgccggtgatgtggcgttgttccatgggcgctccttggtcgtaaaggaaatcgttatcctgacgcaaggcgggaaggggagaaagacggatcggcgataacaaatatcagaaaggtataacagagataacgggcggcagaacgccgcccatctttaccaacagaacgattatttcagttcgagttcgttcattgcagcaatgctgaaaccgccgtcaacgtggaccacttcaccggagataccggcagagagatcggagcacaggaatgccgcagagttacccacatcttcaatagtaacggtacggcgaatcggggtaacggcttcgcaatgagccagcattttgcggaagtctttgataccggaggccgccagagtacggatcggaccagcagagatggcgttaacacgcacaccttccggacccatcgcgttcgccatatagcgcacgttcgcttccagagacgcttttgccagacccataacgttgtagttcgggatagcgcgctcagcgccaaggtaggaaagggtcagcagggcagaacccggattcagcatggagcggcaagcttttgccattgcaacgaagctgtaggagctgatgtcgtgggcaattttgaagccttcacgggtaacggcgttaacatagtcaccatccagctgatcgccaggtgcaaaaccaatagagtgtacgaaaccgtcaaatttcggccaaactttccccagttcagcgaacatggtgtcgatgctggcatcttctgcaacatcgcactgcagaacgatgtcagaacccaattgagcggcaaattcttctacgcggcctttcagtttgtcgttctggtaggtgaatgccagttcagctccttcgcggtgcatcgcctgagcgataccgtaggcgatggatagtttgctggcaacaccggttaccagaatgcgcttaccggaaagaaaacccatagctttaatccttattgttgatgcttgttgtgcctgaaaatcaggcgattcgtcgttttagtaaacagtacgaacagataaacggttattataatcaacctggctgtgagtagctatagttgccaggtccgaccggagcaggctgcggcagggggggcgcttttcccctcaccctaaccctctccccagaggggcgaggggaccgtattgtgcaaatattgttaccccagcaacaaacaggctcatacagcccctaaccctttcatggcgatggctgggacggttcagaccttgccgaatattctccagcaccgtctccatgttttcaccacaacagctattcggctcggtctgccccctcgctctttcagggagagggtgaccggcggttcagttcctgcagaatattctccagcaccgtctcctcattacaatcaatctcgttattccagaaacgcagcacggtccagccctgcgactcaagccagctagtgcgcctggaatcataggcaactgctaaatcatgctgcccaccatccagctcaacgactacacgcgccgagcagcaagcaaaatcgagaatgtagctccccactggatgttgacggcgaaatttgaaatcactaaaacgtcggctgcgaagatatcgccagagctttcgttcctgcaaagtgagattgcgtcttaaatcacgcgcatttgatttaattttatctatcacctcattctgacaagatttaatcttttgtcagaatgaggtgaataatctggaaggaggattcagaaaattagcgatctttacgccacgcatccgccgtcaatgcctcgccaaaatgaccggcaatcagccgtttggtgagttcatgcagcggcgatgccagcacatccgcggtgctgcctcgctcgacaacctcgccctgatgcatcaccagcacctggtcgctaatgtgcttcatcattccgatatgctgggtaacataaatatacgaaatgccctgtttttcctgtaattccagcatcagattaatcaactgcgaacgcatcgacatatccagtgaagcgagggcttcatcggcaataatgacttttgggcgcaatatcagcgcgcgcgccagacccagacgctgtttttgtccgggtgccaacatatgcggatagtaactgacgtgatccggtagcagcccaaccatacgcatcgtttcaataatctgtttgcgacgctgttccggttccaggtcggtgttcaggcgcagtggaaaatccagaatttgcgagatacgttgacggggattcaacgaggtcgaaggatcctgaaaaatcatgcgaatacgctgactgcggaaggaataatcgccaaaatgcagtggatgatcgtcaatcaataactcgccgctggtaggctctatcattcccgccagcatttttgccagcgtggatttacccgaaccattctcgccaataatcgccagtgtctggccttcacgtagcgtaaagctcaagggttttaccgcttctacggtctgacgacgaaaccagccggtccggtagcggaacgttttacttaaattacgcacttcaagcagcgtttcgatcatctcactctttctccatgttcagcgggaaatgacaggcatagagatgatttttcgcccccgtcaaacgtggcgtcacaatgcattctcgttgtgcatacgggcaacgtggccccagacgacaaccaatcggtaactgttccagcagtgggatagcgccgggcagcgtattgaggcgacttttatgcggcatcgcgctgccgaagtctggtatcgcgcggatcagcgcctgggtataaggatgatgtggcatcgtcaccaactccttactcggcgcggtttccactgtttgaccgcagtaaagcacgttaattttatccgcccattggctaagcatttgtaagtcatggctgataagcaaaatagtggtattgctgttttggttgagacgcgtcagcaggcgaaagatttgcgcctgggttgttggctccattgagttggtcggttcgtcagcaatcagcagacgcggttgattcgccagtgcaatggctatcatcactttctgacattcaccttcggtcaactcatagggaaaactgcgcatcgcatctttgtgatctttaatccccacgcggtgcagcagttcaatggcacggcgtttgcgccagccaaaacgctgccaccaacggcctttataggtccaggctgggatgttttgcatcaactggcggcccacacgttctgaagggtcaagacacgactgcggttcctggaaaatcatcgacacgttatggccaaccagtttgcgccgttcgcgtgcggagagacgcagcaaatcgatatcatcaaaacgcatacggtcagcagtaacacgccagttatctttattcaccccacaaatcgctttcgcaatcaaactcttgccggaaccggattcaccaacaagaccgcggatttcaccttcggttaaggtcatacttacccggtcgacggctttaacccactcatcaccggttttaaattcaatggtcaggttacgaatatcgagtaatggcattattccacccccgcaataatcgcacgacgaacgccatcgccaaggaggttaaccaacaacacgctaatcataattgccgcacctggcagcatgacagtccacggggcgacataaatcagttccagcgcatcaccgagcatcgctccccattcaggcgaggggagttgtgcgccgagatcgagaaagcccagcgcggcgatatcgagaattgccatcgacagtgcgcgggtgatctcggtgaccagcccggcggtgatgtttggcatcacagcaaaccagagaatattcagcgttgatgcgccatccagacgggcggcgataacgtactctttttccagttcgtcatgcaccatgctgtaaatcgaacgtaccatacgcggcagcaatgccagccagacagcaaacatagcgtgggacaaactcggtccggcaaacgctacaacgataattgccaacagcagcgaagggatcgccagtaaggtatccagaatatggttaagcaccgctgagcggaggccgtgtgtcgccccggcgaaggtgcccagtaccaggccacagatcgtcgcggcaagcgtcaccacaaatgcgccacccacggttggcgcagctccgctcagtaaacggcttaaaacatcgcgtccgaggtcgtcagtccccaggaagaaagaaacttcgccatagcgcgaccatgacggcggcaataattgataaccgagaaattgctggtcgatgccgtaaggcgcaaaccagccgccaaaaatacacagtacagccagccccgcgcagccgtacaggccgaccatcgcagaggcgtcactataaaatttgcgccaggcggtacgcagcgtgcccggcgggcgcttttcgctgtatacgctatcgtaaggcataccattccttatgtttcagagggttagccatggcacccaaaatatcagaaatcacgttaacaataatgaccagtgagccacacaccatcactccggcggaaatggctgcgtaatcctgctggcggatggcgttaattaaccagcgccctaaacccggccagctaaaaaccatttcggtgatcatcgccagcgtcagcatggtggaaaactgtaagcccaggcgaggaataaccggcggtaacgcgttatgcagaacgtggcgacgcaaaatagtaaagcgcgacaaaccgcgggtcgccgccgcttttacatagttctggtcatacacttcgatagtgctgatacgcatcaggcggatcacttcagttgttggcgcaaccgacagggtgatcacgggcaatatcatatggcggattgcgctcatgatcatttcatcccgccatggtgagtccgaaagccaggcatcaatcaacgcaaaaccggtaatcggtttcacttcgtagagcagatcgaaacgccctgaaacgggcaaccaacctagcgtgagtgaacaaaacagcgtcaacagaagcgccagccagaacaccgggattgaaaagcccagtaaggcgatggcgttgatcaagttatcctgccacttatggcgcgtaatcccggcaatcatccccacggggatgccaacaatcagcgcaaaaccgaaggcgaggatgcacagttccatcgtcgccgggaagacctcttttaactgttcggcaatcggttgaccgttaatgctggaaacaccaaaatcccagtggatcaggccgttaaaccagaacacccaggcattccacagtgacgcgccttgtaacggcgcatgaggggtgaaatagctcaagctgaagccaacgaaggtcagcaggaacaaggtgacaatcaataacaaaatgcggcgtaaggtgaagataatcatggttttttcacctcatcctgtttctcgcgatacaccccagcaaaggaggcgttaccaaacgggctaagtaccagacctttgatatcgtaccgataggcctgcaaacgcaatgacgacgccagcggcaaaatgggcaattcctgcgccagaatactctgcgcttcgtcataggcttcaatacgcgccgccagctgctgcgaagagagcgccttacgcaatacgctgtcgaatttcggatcgcaccagtgggcgaggttggtctgcgaatgaattgccgcgcagctcagtaacggacggaagaaactgtccgggtcgttactgtccgtcgcccaaccggataacgtcagatcatggctcatatccatcaaccgcgcctcctgaaagcgaccttctaccggcacaatcaccacttttacgccaacctgcgccatatccgcctgaatcagttcggcagttttcagtggactggggttccacgcctgcgaacgtgtgggcacccacagtttcagcgttaaattttccagccccaacgacttcaactgttcgcgcgatttcgccggattgtattcagtaattttagcctcgttgtcataggcccacgaggcgcgcggtaaaatagaggccgccgtttcagccgtaccataatagatggattgcatcaggcgctggttattaatcgccagtgccagcgcatggcggacagcgggattatttagcggcggtttggcggtgttaaatgccagataggcgacgttcatcccaggacgcagcgttaaacgcaagcgcgggtcgtcacgcaaaatggatagctggctggcagcaggccaggccagaacgtcgcattccccggtcaggagtttcgacagacgtccggtgccgccggagcctaaatccaccactacctgcggcattaacggtttaccgcgccagaagtcatcatgacgttgtaggcgaataaattgcccggcgcggtattccgacaactgatacggaccggtgccgaccggttgacggtcgagttgctcctggcgatcttctttctctaacttccgggcatattctgccgacatgaccgaagcataatgggttgcgaggtgccacaaaaaagaagcatccggctgggcgagtcggaactcaacggtatgattatccagtttgcggacgcttttcacgttatcggcaaattgcaggctgtcgaagtaggggaagttgctgccgttgacgttatgccacgggttgttgcggtcaaaaattcgctggaaggtaaacaccacatcgtcggcattcattttacgagtgggagtaaaccagtcggttttttgaaacggaacatcgcgacgcaggtggaagcgataggtcgcgccgttgtcgagtacttcccagctttcggcaagttccggcatcaggcgataggtatagggatcgacatccagcagtcgatcataaaactgggcggcaagggtatcgacaattaacccactgctcgctttggatgggttaaaggtgttgacttgcccgctgacgcaatagacaaaaccgctgtcgcggatatcagcatgcgggggagattcaggcgcggcgattgcctgaccactcacaagtccagcaatcaccaaaagagacgataatacctggcgcataatattaagggattttatgtaaagaggctatcttactaatatttaatgacatttgccattaccgtttgtgttcaggggtcgtaatgagggccgtgtggttggtcgttgaacaggtgacgtcgccatctgttcaacattcgtacccgtgatttctctataactataactcacagaacaacttagcgaggagcagagcggtacgatcgtgagaaacccattaaagcacgctgcagtgcgtgtcattgttagccagatgcggcgtgaacgctttatccggacaacgatactgaccgatcgtctgcaattaaatcattactcattaccccattgattcaaaaactctgcgatctcatcaatgcgtacgggattaatccccgcttcagcagccatttcatgttgggcttcttcgctgatctcttcattgttcatcaaacgggtgagcagtaactggaagtagtgggccagcggtgtgcgttcagcctctgcgacaggctctgcgcattcggtcgcgtactcatcggcaatatcaaaatattttagcgggatatcgtggttcattatttgcccctggggttaatgcgctaagcataagggcggatgatagcactcgtgatccgggtcatacatctttttatagttaatggcgcggcgcgttaccctcaggcaggataatgcgccgcgcatccgactattacgtttcactcaccggcgttctgtcaccatcatacaacggcactttgcgatagcggcggatcagataccataaatatgcgccgcctaacgaagcccataccagaccgagtgtcagtgacgttgactcgaggttaacccacagcacacccaccgtcagcgcgccaaccagcggcatcagcaaatagtggaagtgatccttccagcttttattcattcctttacgccgccagaaatgattaaacaccgacagattcacgaaggtaaacgccaccagagcaccgaagttaattaacgctgtggcggtaactaaatcgaagaacagcgccgacaacgcgacaatcccgaccataatgacgttgagtgccggagtccgccattttgggtgcacatagccaaacacgcgctccggaaacacattgtcacgccccatcacatacagcagacgcgacacgctggcatgtgaagccaggccagaggctaacgtgttcacaaacgtggtgcagaggaaaatcgactggaagagcttgccgccgacgtacagcgcaatttcaggcagtgcggcatccggatctttaaagcggctgatatcgggaaagaacagctgcataaagaacgacgccgcgataaagataacgccaccgtagaccgccgtcaggaagatggctttcgggatcacgcgtgcggcgtccggcgtctcttccgaaagcgtggtcaccgcatcgaaaccgaggaaggagaaacagacaatcgtcgccccggtaataatcgggatcaggtgcgcgttctcgctgataaacggctgaagtgaccagacggtgccaacgccttctcctttatgcagtccctgaactaccaggaagataaacaccaccatgatggagatttgcaccagtacaaacagggtattgaagttagcgaccaggttgacgctcttcagattcgcggcggttaaaatggcgacgaaggttaccacccacacccacggcggcacttccgggaagagggcggagagatagattttcgccaacaagacgttaatcatcggcaaaaagagataatccagcagcgatgaccagccgaccataaatccgacgtgcgggttaatcgacttttgcgcgtaggtataggccgaaccggcctccggaaactggcgaaccagtttgccgtagctgatagcggtaaacagcacacccgccagcgccagcaaataggacgccggaacgtgaccgtcgctaatgccggagacaataccaaaagtatcaaatacggtcatcggcgtgagataggccagacccatcatcaccacctgccacaatttcagtgattttcgcagacgggttttgccgggttgcgcagcaatattcagtggtgaattaatagccataattgctgcctcccctgcgtaataaggtttgcggtcgtgtcgacctgaaatcaaacctgtttagcaagggaagcaaagggggcggagtccagtcagtagcaggaggggcgcatacgcagcctccctcgccatgcggggatttaatcatcggcatcatctcatttcctcgtcacagtcttaatcgttaacggaagcccgttgccgcccgcgctccataacgcgacatccgggaaatgtctggattaccagcaaatgtcaggcctggctccgctcaggccgatgaaacaaccccgcaaggggtattacgcgtttttcaacatccactcaatttctgtttctgtgatgaggcgctcaaactgcaacagctcatcatttttacaggcgtgatagacatggcagaagcgttcgcctaaatagcggcgcaggtgatcattctcgataaactcacccagggcatcgctctggcgaatcggaaagggtaagccttcctgttccagcccgttgccttcgacttcttcctgcaacggcagctcgttatcaaggccatgcaaaataccggcaaaaatcgctgccatcaccagatatgggttggcatcggcacccgccacgcgatattccacgcggtgattatgacggtcgccgcacggaatacgcagggcgacggtgcggttgttatggccccacgacgcctgcgtcggcacatacattcccggctggaagcggcgatacgagttcacgtttggtgccagcaacgccatcgacgacggcatcaggtcaatcatcccggcgagcatctttttcagcagcggcgaatcttcgccttccgcgtcagaaagcacgttctcgccacgattattttgcatactgatatggatatgcattccgctgcccgcgtgctcttcatacggcttcgccataaaagtggcgtgcatcttatgcttttctgccatcagacgcaccaggcgttttagtgccagcgcatcatcgcaggcttccagcacgttatcagtatggtaaaggttgatttcaaactgacccggcgaggcctcagcgaccgcgccatctgccggaatcagctgtaactgcgccagttcatcaatatcattgagcacgtcggcgaagtggttgaggttatcaacggagtaaacctggctttgtgtattgcggtcatcggtgccaggcgcgcagggcggttgcagatacccttcagcgtcgcgctggcgatccagtaaatagaactccagctctaccgctacgaccgggaacaatccgcgctggcgcagctgctgccacaggcggttaagaacgttccgcggctcaacgtcaaagggagcgccatcttcatcgaccatggtcaggagcatctgaccgataaactctggatcggcggcagaaggagttaaggaaccgagaacaggaacacaggtacgatccggctcgcccatttcctgacccagacctgcttcttctactacgttgcccagaatatccattgcaaataccgaggccgggaaataacaccctttctcgagcttcttcaggcttgaaacaggaatacgctttccacggaagcaaccatttaaatcggtaagtaaaacatcaacatattgcgtattcgggtagcgctccaggtagcgtttcacttcctgcgtaaaggcgctaccccgcctctcttctgactgctgaacaaagttctctacttcaacgatattggtttccatgattcttcgcctttggtttgttttccgctcgttatcaaagcgtaaaatataatgaccaccattcgaatctgtatgcaaactaaatgtttgtcaaatgttaaattgagtttgcaaaaatgaaaacacactgctagattgaaaaaatattgaacataaaggtcatttaaagcgcagtaatggcgataatttagtccactttgtgagattgagcatggaaaatataatgaacaatccggttatcggtgtcgtaatgtgcaggaacaggcttaagggccatgcgacccagactctgcaagaaaagtacctgaatgccatcatccatgcaggcggcttgcctattgcgctaccacatgcgctggcggaaccgtcattacttgaacaacttttgccgaaactcgatggcatttatcttcctggtagtcccagcaatgtgcagccgcacctatatggtgaaaacggcgatgagcctgacgccgatcccgggcgtgatcttctgagcatggcgataattaatgccgcactcgaaaggcgcatccccattttcgccatctgccggggtttacaagaactggtggtggcaaccggtggttcgttgcatcgcaagctgtgcgaacagcctgaattgctggaacatcgggaagatcccgaactgccggtggaacagcaatatgcaccgtcgcatgaagttcaggttgaagaggggggattactgtctgcgttgttacctgaatgtagcaacttttgggtaaactctctacatggacaaggggcgaaggtcgttagcccacggttgcgtgttgaagctcgctcgccggatggcttagttgaggcggttagcgtcatcaatcatccttttgcgctgggcgtacagtggcacccggaatggaacagtagcgagtacgcgctttcgcgtatattgttcgagggctttatcaccgcttgtcagcaccatatcgctgaaaaacagcgactctgaccactacagtttaaggaaatgcaaatatgagtgatgagggactggcgccaggaaaacgcttgtcggaaatccgccagcagcaggggctttcacaacgtcgtgccgccgaactctccgggctgactcacagtgctatcagtacgatagaacaagataaagtcagccctgccatcagtacgctgcaaaagctgctgaaggtgtatggtctgtcactctcggaattcttttccgagccggaaaaacctgatgagccgcaggtcgtcattaatcaggacgacttaattgagatgggtagtcagggtgtgtcaatgaagctggttcataacggtaacccgaatcgcacgctggcgatgatctttgaaacgtaccagccgggcacaaccactggggaaagaattaagcatcagggtgaggaaataggcactgtactggaaggtgaaattgttctgacgattaatggtcaggattaccacctcgtcgcggggcaaagttatgccattaataccggcatcccgcacagtttcagtaatacgtcggcaggtatttgccgaattatcagcgcccatacgcccaccacgttttaatctttttgttctgtaagccgggtaagcgcaatgcgcccggcaatctatacacaaaatcattcaagttgcatcaaggcggcaagtgagcgaatcccgatgagcttactcaggtaagtgattcgggggagcgaacgcagccaaggcagaggcggcttgaaggatgaagtgtatataaagaatgtcgccagaaataaacgggcatacggcccggggatctctgcgccctgacgttcacaaactgcatatatctgatagacgtgaaacaggagtcataatgaattttcatcatctggcttactggcaggataaagcgttaagtctcgccattgaaaaccgcttatttattaacggtgaatatactgctgcggcggaaaatgaaacctttgaaaccgttgatccggtcacccaggcaccgctggcgaaaattgcccgcggcaagagcgtcgatatcgaccgtgcgatgagcgcagcacgcggcgtatttgaacgcggcgactggtcactctcttctccggctaaacgtaaagcggtactgaataaactcgccgatttaatggaagcccacgccgaagagctggcactgctggaaactctcgacaccggcaaaccgattcgtcacagtctgcgtgatgatattcccggcgcggcgcgcgccattcgctggtacgccgaagcgatcgacaaagtgtatggcgaagtggcgaccaccagtagccatgagctggcgatgatcgtgcgtgaaccggtcggcgtgattgccgccatcgtgccgtggaacttcccgctgttgctgacttgctggaaactcggcccggcgctggcggcgggaaacagcgtgattctaaaaccgtctgaaaaatcaccgctcagtgcgattcgtctcgcggggctggcgaaagaagcaggcttgccggatggtgtgttgaacgtggtgacgggttttggtcatgaagccgggcaggcgctgtcgcgtcataacgatatcgacgccattgcctttaccggttcaacccgtaccgggaaacagctgctgaaagatgcgggcgacagcaacatgaaacgcgtctggctggaagcgggcggcaaaagcgccaacatcgttttcgctgactgcccggatttgcaacaggcggcaagcgccaccgcagcaggcattttctacaaccagggacaggtgtgcatcgccggaacgcgcctgttgctggaagagagcatcgccgatgaattcttagccctgttaaaacagcaggcgcaaaactggcagccgggccatccacttgatcccgcaaccaccatgggcaccttaatcgactgcgcccacgccgactcggtccatagctttattcgggaaggcgaaagcaaagggcaactgttgttggatggccgtaacgccgggctggctgccgccatcggcccgaccatctttgtggatgtggacccgaatgcgtccttaagtcgcgaagagattttcggtccggtgctggtggtcacgcgtttcacatcagaagaacaggcgctacagcttgccaacgacagccagtacggccttggcgcggcggtatggacgcgcgacctctcccgcgcgcaccgcatgagccgacgcctgaaagccggttccgtcttcgtcaataactacaacgacggcgatatgaccgtgccgtttggcggctataagcagagcggcaacggtcgcgacaaatccctgcatgcccttgaaaaattcactgaactgaaaaccatctggataagcctggaggcctgaaatgaccgaacataccagcagttactacgccgccagtgcgaataaatatgcaccattcgacacgctgaatgagtcaatcacctgcgacgtttgcgtggttggcggcggctataccgggctctcctccgcgctgcatctggcggaagcgggctttgacgtagtggttctcgaagcctcacgcatcggctttggcgcaagcgggcgcaatggcggacagcttgtgaactcctacagccgcgacatcgacgtgatcgaaaaaagctacggcatggacaccgcccgtatgctcggcagcatgatgttcgaaggtggtgagatcatccgcgaacgtatcaaacgttatcagattgactgcgactaccgccccggcggcctgtttgtggcgatgaatgataaacagctcgccacacttgaagagcagaaagagaactgggaacgctacggcaataaacagctggaattgctggacgccaacgccattcgccgtgaagtagccagcgatcgctataccggtgcgctgctggatcacagcggtgggcatattcatccgcaaaaccttgccattggcgaagcggacgccatccgcctcaacggcgggcgcgtgtatgaactttctgccgtgacgcagatccagcacaccacgccagccgttgtgcgaactgccaaaggtcaggtgacggcgaagtatgtgattgtcgccgggaatgcgtatctgggcgataaagtagagccggaactggcgaaacgcagcatgccgtgcggcacgcaggtgatcaccaccgaacggctgtcggaagatttagcccgttcgctgatcccgaaaaactactgtgtggaagactgtaactatctgcttgattactaccgtcttaccgccgacaaccgcctgctgtacggcggcggcgtggtctacggcgcgcgcgacccggatgacgttgagcgccttgtggtgccgaaactgctgaaaaccttcccgcagctgaagggcgtgaaaattgattaccgctggacgggcaacttcctgctgaccctgtcgcgtatgccgcagtttggtcgcctcgataccaacatctattacatgcagggctacagcggccacggcgtgacctgtactcatctagccggacgtttgattgccgaactgctgcgcggcgacgccgaacgtttcgatgccttcgccaatctgccgcattacccgttccccggcgggcgcacgctgcgtgtgccgtttaccgcgatgggcgcggcgtattacagcctgcgcgatcgtctgggcgtttaatttccgattaaccgtgaagagtcaaaaggtgtgaaacatgagcaacaatgaattccatcagcgtcgtctttctgccactccgcgcggggttggcgtgatgtgtaacttcttcgcccagtcggctgaaaacgccacgctgaaggatgttgagggcaacgagtacatcgatttcgccgcaggcattgcggtgctgaataccggacatcgccaccctgatctggtcgcggcggtggagcagcaactgcaacagtttacccacaccgcgtatcagattgtgccgtatgaaagctacgtcaccctggcggagaaaatcaacgcccttgccccggtgagcgggcaggccaaaaccgcgttcttcaccaccggtgcggaagcggtggaaaacgcggtgaaaattgctcgcgcccataccggacgccctggcgtgattgcgtttagcggcggctttcacggtcgtacgtatatgaccatggcgctgaccggaaaagttgcgccgtacaaaatcggcttcggcccgttccctggttcggtgtatcacgtaccttatccgtcagatttacacggcatttcaacacaggactccctcgacgccatcgaacgcttgtttaaatcagacatcgaagcgaagcaggtggcggcgattattttcgaaccggtgcagggcgagggcggtttcaacgttgcgccaaaagagctggttgccgctattcgccgcctgtgcgacgagcacggtattgtgatgattgctgatgaagtgcaaagcggctttgcgcgtaccggtaagctgtttgccatggatcattacgccgataagccggatttaatgacgatggcgaaaagcctcgcgggcgggatgccgctttcgggcgtggtcggtaatgcgaatattatggacgcacccgcgccgggcgggcttggcggcacctacgccggtaacccgctggcggtggctgccgcgcacgcggtgctcaacattatcgacaaagaatcactctgcgaacgcgcgaatcaactgggccagcgtctcaaaaacacgttgattgatgccaaagaaagcgttccggccattgctgcggtacgcggcctggggtcgatgattgcggtagagtttaacgatccgcaaacgggcgagccgtcagcggcgattgcacagaaaatccagcaacgcgcgctggcgcaggggctgctcctgctgacctgtggcgcatacggcaacgtgattcgcttcctgtatccgctgaccatcccggatgcgcaattcgatgcggcaatgaaaattttgcaggatgcgctgagcgattaatagcccaacgcaataatgtctgatgcgctgcgcttatcaggcctgcaaacgacgtattgattatgtatgccgaataaagcattcacgccgcatccggcaagttgtattgctcaacttcgctaaatctggtgctttttcaacaacgcgcggaactgatgataagttaaccccagtaattcagccgcgcgcttctggttatatttcccttgttgcaaactgagttgcagcaactctttttcctgctgcatctgaaactcacgtaaatccagcggcagtgttggaagcgaggtggattctgaaacggcgatagcgtcttcaggcggacgccgtttaaagggatcaataatgatgtcatcaagcggataatcgctggtgccgtggcgatacactgaacgttccaccacgtttttcaattcacgaatatttcccggccaacgataattcagcaatgtttctctggcgcgctccgtaaaccccgggaacagaggcagcttgatttcccgacacatctggatggcaaagtattctgccatcaacattatgtcgctttcgcgctcgcgcagtggtggcagttgtacaacatcaaaagccagtcggtcgagcaggtcagcgcgaaaagtgccttcattgaccatcgccgggagatcggcattcgtcgcgcataccaaccgcacattcacctgcaatggctggctgccgccaacgcgctccagttcaccgtactcaatcacgcgcaataatttctcctgcaccatcatcggtgccgtagcgagttcatcaagaaatagcgtaccgccgtcggcacgttcaaatctccctggatgacgtttttgcgcaccggtaaacgcccccgcttcgtgaccaaacagttcggaatccagcagattttcatttaacgccgcgcagttaagggaaataaacggcccttgccaacgggaggagagataatgcaggcggctggcaatcagctctttaccggtgccgcgttcgccgatgatgagcaccggtttgtccagcggtgcgagatgcgaaacctgttccagcacttcgagaaagctgttcgcctcaccaagtaaattatctttgtattctgccatgatgaaattcgccacttgttagtgtaattcgctaactcatcctggcatgttgctgttgattcttcaatcagatctttataaatcaaaaagataaaaaattggcacgcaaattgtattaacagttcagcaggacaatcctgaacgcagaaatcaagaggacaacattatgggtattttttctcgctttgccgacatcgtgaatgccaacatcaacgctctgttagagaaagcggaagatccacagaaactggttcgtctgatgatccaggagatggaagatacactggttgaagtacgttctacttcggcgcgcgcgttggcagaaaagaaacagctgactcgccgtattgaacaagcgtcggcgcgtgaggttgaatggcaggaaaaagccgaactggcgctgctgaaagagagagaggatctggcacgtgcagcgttaattgaaaaacagaaactgaccgatctgattaagtccctggaacatgaagtgacgctggtggacgatacgctggcacgcatgaagaaagagattggcgagctggaaaacaaattgagcgaaacacgcgctcgccagcaggcattgatgttacgtcatcaggcggcaaactcgtcgcgcgatgtgcgtcgtcagctggacagtggcaaactggatgaagcaatggctcgtttcgaatctttcgaacgtcgtattgaccagatggaagcggaagcagaaagccacagcttcggtaaacaaaaatcgctggacgatcagtttgccgaactgaaagccgatgatgcaatcagcgaacaactggcacaattaaaagccaaaatgaagcaagacaatcaataataacatccaggcggcgtccgaacgcgccgccgctcatcgtctaaggagtacttatgagcgcgctatttctggctattccgttaaccatttttgtgctgtttgttttaccgatctggttatggctgcattacagcaatcgttctggtcgcagtgaattgtcgcaaagtgagcagcagcgattagcgcaactggctgatgaagcaaaacggatgcgcgaacgtattcaggcgctggaatctattcttgatgcagaacatccgaactggagggatcgctaatggcgggcattaatctcaataaaaaattatggcgtattccacagcagggcatggtccgcggcgtctgcgccgggattgccaactattttgatgtaccggtaaaactggtgcgtatcctggtggtgctgtcgattttcttcggtctggcgctgtttaccctggttgcttacatcattttgtcatttgcgcttgatccaatgccggacaacatggcctttggtgagcagctaccttccagcagcgaattgctggatgaagtcgaccgtgaactggcggcaagtgaaacgcgtttacgcgagatggaacgttatgtcacttccgatactttcacgttacgtagccgtttccgtcaactgtgaggaaagttatgaatactcgctggcaacaggccgggcaaaaggtaaagcctggtttcaaattagcaggcaagctggtacttcttaccgcactgcgctatggcccggcgggtgtggcgggctgggcgataaaatcagttgctcgccgaccgctgaaaatgttgctggctgtggcgctggaaccgctgttaagtcgggctgctaataaactggcacagcgttataaaaggtgaggggagtttcgcaaaaattgttaaatctcaggcgtataatggatggcaattttcatccatagaaggacgcttacatgtttaaaaaaggcttacttgctctggcactggtgttttcactgcccgttttcgccgctgaacactggatcgatgttcgtgttccagagcagtatcagcaagagcacgttcagggggccatcaatattcccctgaaggaagtgaaagagcgcattgccaccgccgttccggataaaaacgacaccgtgaaagtgtattgcaatgccggacgccagtcagggcaagcaaaagagatccttagcgagatgggatatacccacgttgagaacgccggtggcctgaaagacatcgcaatgccgaaggtcaaaggttaaaagaattcaccatgagcggcgcttatgcgccgttttttttctgtcacaccttatttacatccccatagattatttgcgtcagctcacaaatacgctttttccctggtaaaaaatgatttcctgcgtgactaaaacccttgtgctcaattgacagtttattttctgcggagtagtctctcgtttcatgggaccgctaccacggaaaggcaacatgaaacagaaaattacggattacctggacgaaatctacggtggaacatttaccgcaactcatttacagaaacttgtaacgcgtcttgagagtgcgaaacgattaattacacagcgacgtaaaaaacactgggatgaaagtgatgtcgtgttaattacctatgccgatcaatttcacagcaatgatttaaaaccattacccacatttaatcagttttaccatcaatggctgcaaagcattttttcacatgttcatttgttgccgttttatccatggtcatctgatgatggcttttcgggtgatgctgccaacttactgatttagtgtatgatggtgtttttgaggtgctccacttctcccaaaccaacgtttaagaaaatgcagcgattacgactaactggcatcatccccgatttttattcaaggagatgatcatgcttattggctatgtacgcgtgtcaacaaatgaccagaacaccgatttgcaacgtagtgcgctgaactgcgcgggatgtgagcggatttttgaggataaaatcagcggcactaagtccgacagactggggctgaaaaaactgctcaggacactatcggcaggagacacgctggttgtctggaagctggacaggttggggcgcagtatgcggcatcttgttacgctgatagaagagttacgccagcgtggtgtgaatttcagaagcctgactgacagtattgataccagtaccccaatgggccgtttcttttttcatgtcatgggtgccctggctgaaatggaacgcgaactgtagtggcacactaaatttggccacctgatgaaaggtgatattctcaccacaacacaaaacaggtgacttaatgaacaagaaaaccaaacgaaccttcacccctgagttcaggctggaatgtgcacagctgattgttgataagggctactcatatcgacaggccagtgaagcgatgaatgtcggttcaaccacgcttgagagctgggtacgccagctcaggcgagagcgccagggtattacgccctctgccacacccattactccagaccagcaacgtatccgcgagctggaaaagcaagttcgccgtctggaggaacaaaatacgatattaaaaaaggctaccgcgctcttaatgtccgactcgctgaacggttcacgatagccgccagactaagtgacagccacacggttgtcagcctgtgttctgctctggaaatacaccgcagcagttaccggtactggcgaaaacgacgcgatacggttaatccggcacgagtcaggttgtgcagcgaaatacgccgggcgtggaaccaaagtcggggctctgcgggcgcgcgcactctggctgaaatgctgactcaaaacggcgtcccgatgagccgttaccgtgccggacgtctgatgaaatatctgaacctgagcagttgtcagcccggaaaacatcagtataaaaatgcccgtcaggagcataccagcctgccgaatctgcttgagcgtcagttcgcagtaccggagccagaccgggtatggtgtggagatattacgtatctctgggcaggaaatcgctggtgctatctggcggttgttatggatctttttgcccgcagggttatcggctggagtctgtcagcgcatgccgataccgcactgataagcagtgccctgcggatggcctatgagacgcgtggccaaccccgggatgtcgtgttccatagcgaccagggaagccagtatacaggccttaaatatcaacaacttctctggcgttgcagaataaatcaaagcgtcagtcggcggggaaactgctgggataacagccccatggaacgcttcttccgcagtctgaaaacagaatgggtgccaacgaatggttacgcaggcaaggacgaggcccggcagcaaattaatgattacatattgaactactacaacagcgtcagacctcaccattataacggtgggctgacgccggaagagtcagagaacagataccatttttactgtaaaaccgtggccaatattacttgaccactacaaactgatagttgaacgtaccagggcagggctggctgcagctcgtgccaaaggcagagtaggtggacgccgtcctaagttgaccaccgaacagtgggcacagattgggcgtttactcgaggccggagaatcaagacagcgtattgcactgatttttgatgtaggcgtttctaccatttatagaaaatttccggcaaataagagcaatgaatccccctgaatcagcattattttgattatccctgcaaatagacaaataccgtcattttgtgtgaataacgacacaactgcgcttagctgtttgtcaggcacaatcacttcaacatagggcgaagcctaatccaatcaggaggttcgccactatggctcaggattaccaccacggggtgcgcgttgttgaagtcaacgaaggcacccgatctattaccacggtgagcaccgccatcgtgggtatggtctgcacgggcgatgatgccgatgcaaaaatgtttcctcttaataaacccgtgctgatcactgatgtgctgactgccagcggtaaagcgggtgagtcaggtactctggcccgttcgctggatgccatcgctgaccaggcaaaacccgtgaccattgttgtgcgtgtgccgcagggtgaaacggaagacgaaaccacgaccaatatcatcggcgcagtgactgctgaaggtaaaaaaacaggtatgaaagccctgttatctgcccagtcacagctcggcgttaaaccgcgcattctcggcgtgccaggccacgacaccaaggcggtagctactgagttgctaagcgtggcgcaaagcctgcgtggatttgcttacctgtcagcgtatggctgcaagacagtgcaggaggcgatcacttaccgcgaaaacttcagccagcgtgaagggatgctgatctggcctgactttactggctgggacacggtgctgaatgccgaagcaacggcatatgccaccgcccgtgcgcttggtctgcgcgccaaaattgacgagcagaccggatggcacaaaagcctgtccaacgtgggcgtgaacggtgtcaccggaatttctgcagatgtgttctgggatctgcaggacccggcaaccgatgcaggtctgctgaaccagaacgacgtcaccacgcttgtgcgtaaagacggtttccgcttctggggttcccgctgcctgagtgatgacccgctctttgccttcgaaaactacacccgcacggcgcaggtgctgatggacacgattgcagaagcacacatgtgggcggtggataaacctcttaacccgtcgctggcccgcgacattatcgaaggtatccgcgccaaaatgcgcagcctggtcagtcagggctatctcattggtggtgattgctggctggatgagtcggtgaacgacaaagacacgctgaaagccggaaaactcaccatcgactatgactacacgccagtgccgccacttgaaaatctgatgctgcgccagcgcatcaccgatcagtacctggtgaattttgccagccaggtcagcgcgtaaggggacaacatggctttaccacgcaaattaaaacatctgaacctgtttaacgacgggaacaactggcaggggatcgtagagtcgctgacgctgccgaaattcacccgcaaatatgagaagtatcgcggcggcggaatgccgggtgcagtagatgtggatctggggcttgatgacagtgcgctggacacagaattttccattggtggtactgaactgctgctgtttaagcagatgggcaaagccactgtggatggcatccagctgcgctttaccggctctatccagcgtgacgataccggggaagtgcaggctgtggagcttgtggtgcgtggacgtcacaaagaagtggattccggcgagtggaagacgggcgaaagcaacaccaccaaagtgaccagtaccaacagctacgcgaagctgaccatcaatggtgaggtgctctatgaagtggaccttatcaacatggtggaaattgtggatggtgtggacctgatggaagcacaccgcaacgcactcggcctctgatctatctgaacggcgcgggataccgcgccagaacccaatttaaaggacagcaaaatgagcgataagcagactgaaaagaccattcaactggatacccccatcaagcgcggtaaaacagaaatcaccgaaattgtgctgcgtaaaccgcagtccggtgcgctgcgcggtacacgcctgcaggccattatggatatggatgtgaacgcgatgatgaccgtgatcccccgcatctccagtccggcactgactgcacaggaaattgcagagatggacccggcagatctcactgccatgtcggttgaggttgtcacttttttgttgaagaagtcggtgcttgccggtttaccgacagcctgacggttgacgatctggtggcagatatcgccaccatttttcactggccgccatccgttactgacgttatgccgctgaccgaagtgctggaatggcggtataaagcgattcagagaagcggggccaacgatgagtgataataacctgcggctgcaggtcattcttaatgcggttgacaaactcacccgcccattccgtgctgcacaggccagttcgaaagagctggctggcgcaatcagaaactcccgtgacgcattaaagcaactcaatcaggcgggtaacagcctggaaaaatttcgcaagctgcaggccgataacaagaagttaggcgacaggctgaactatgccagacagaaggctaatttgcttagctctgagctggagtcgatggaacaaccatcacaacggcaccttgtagctttaggtcggcaaacgctggcagtccaacgtctggaagaacaacaaaaatatttgcagaagcaaacggcgcttgtgcgtgcagaactgtaccgggcgggaatttctgcgaaagatgatgcgggagcaactgcccgtttagcccgtgaaacatcacgttataaccaggaactgtcgaaacaggaggcgcggctgaagcgactgggggaagctcagcgcaggatgaatgcagcgcgtgccagttatgcccgttcgctggaggtgcgcgatcgcatcgcaggagccggagccaccaccacggctgcagggctggcaatggggacgccagtgatggcggcagtaaaaagctataccagcatggaagatgccatgaaaggtgtggcaaagcaggtcaatggtctgcgtgacgataatggcaaccgcactgcacgtttttatgaaatgcaggatgccatcaaggctgccagcgaacagttgccgatggaaaacggtgcggtggacttcgctgcactggttgaaggtggtgcgcgcatgaacgtcgcaaaccctgacgacagctgggaagaccagaaacgtgacctgctggccttcgccagtacagcagcaaaggcggcaacagcctttgagctgccagcggatgaactgtcagaaagtctggggaaaatcgcccagctatacaaaatacctacccgcaatattgaacagctcggcgatgcgctgaactatctggatgataacgccatgtcgaaaggggcggacatcattgatgtgatgcaacgtctgggcggtgtggctgaccgtctggattatcgtaaagcggcggcactgggttccacctttctgacactgggcgctgcgccggaggttgcagccagtgcagcaaacgcgatggtgcgtgaattgtccattgccaccatgcaaagcaagagtttctttgaagggatgaatctgctgaaactcaatcctgaagtgattgaaaagcagatgacgaaggatgcgatgggaactatccagcgtgtgctggagaaggtgaacgcactgccgcaggacaagcgtctgtctgccatgaccatgttgtttggtaaagagtttggtgatgacgcggcgaaactggcaaacaaccttccggaactgcagcgccagctaaaactgacagcgggcaatgatgcgctcggttccatgcagaaagaatccgacatcaacaaagactcactttctgctcagtggttgctggtcaaaaccggagcgcagaacaccttcagcagcctgggcgaaacgctgcgccagccgctgatggatattctgtacacggtgaaaagcattacgggggcgttgcgccgctgggtggaagctaacccggaactgacaggcacactgatgaaagtagcggctgttgtggctgcggttaccgtaggcctcggcaccttagcggtggcgctggctgcagtgctggggccgctggcagtgatccgtctgggattctctgtgctgggtatcaaaacgttaccttccgttacggcagcagtaactcgaaccagcagcgcgttgtcctggctggctggcgcaccactggcactgctgcgacgcgggcttgcttcatcgggcaacgcagcgggtttacttactgctccgttgtcatctttgcgtcgcacggcatcactgacggggaatgtcctgaaaactgtagcaggtgcgccggttgcacttttgcggtctggattatccggtttacgtgctgttgctgtgatgtttatgaatccactggcagcactacgcggtgggctggctgccgcaggcgcggtgctgcgtgtgctcgcatccggcccgctggcgatgttgcgcattgccctgtatgccgtatctggtctgttaggtgctctgctcagtccgataggtcttgtggttactgcactggcgggcgtagcgctggttgtctggaaatactggcaacctatcaccgcatttctcggtggcgtggtggaaggattcaaagcggcggcaggtcccatcagtgcagcattcgaaccacttaagcctgtgtttcagtggattggcgacaaagtgcaggcgttgtggggctggtttactgatctgctgacgcccgttaagtcgacctctgtcgaactgcagagcgcagcggcaatggggcgacgattcggggaggcactggcggaagggctgaatatggtcatgcatccgctggactccctgaaatccggcgtttcctggttgctggagaaactcggcattgtcagtaaagaggccgcaaaggcaaaactgccggaaagcgtgacgcgtcagcaacctgcgacggtgaatgcagacggtaaagtgatgatgccatcgggtggtttcccgtcatggggatatggctttgcggggatgtatgacagcggtgggtatatcccacacgggcagtttggcatcgtcggtgaaaacgggcctgaaattgtcaacggtccggcaaacgtgaccagccggagaaatacagctgcactggctgccgttgttgccggaatgatgggcgttgctgccgcgccagcagagcttccaccgttgcaccctttggcacttcccgcgaaaggtggagaagcgatggtgagtcgcgcagccactgtgccgcccgtttacagcattgaggcaccgacgcagatcatcatccagacgcagccaggacaaagtgcgcaggatattgcgcgggaggtggcccgccagcttgatgaacgtgaacgcaggctgaaggcaaaagccaggagtaactacagcgatcaggggggatacgacgcatgatgatggtgctgggattgtacgtgtttatgctgcgcaccgtgccgtatcaggaactgcagtatcaacgcagctggcgacatgcggcaaacagccgggtaaatcgacgtccgtccacgcagtttctgggaccggacaacgacatgctgacgctttctggtgttcttatgccggagataacaggtggcaggctgtcgttgttggcactggaacagatggcagaacaggggaaagcatggcccctgattgaaggcagcggcacgatttacggcatgtatgtgattgagggactaaatcagactaaaacggagtttttccgcgatggtatgccgcgccggattgagttcactctgtcgctcaaacgggtggatgaatccctgtccgatatgttcggtgatcttagtgcgcaactgaataatctgcaggacacggtaacgtctgccttaagtgatatcagtaaaacggtgggagggctgctgtcgtgaatttcagctctgaactgcttaacaaaggcaacaaaactccagcattcagcatcagtattgagggcagggatatcaccactgtgctggacaaccgcctgatggggcttacgctgacggataaccggggctttgaagcggaccagcttgatctggagctggacgacgccgacggaaaaatcgtgctgccgcgccgtggtgaggtcattacgctggcgctgggctggaaggggcagccgcttttcccgaaaggggcattcacggtggacgagattgaacacactggcgcaccggatcgcctgactatccgggcgcgaagtgctgattttagggaaacgctgaatacccgccgtgaaaaatcgtggcacaagaccactgtcggggaagtggtgaaggaaatagccgcgcgtcacaagctgaagatggcactgggtaaagacctgtcggataagcccgtggagcatatagaccagactaatgagagtgacggcagttttctgatgcggctggcgcgccagtacggtgccatcgcgtcggtgaaaaatggcaatctgttattcatccggcagggacagggcaaaagcgccactggtaaaccactgccggtgatcactatcacacgcaaggacggcgacagtcaccgctttatcctggcagatcgcggagcctacacgggggtaattgccagctggttgcatacccgcgaacccgcgaagaaagaaagcactacggtgaagcgtaagcacaggactaagaagcagaagaaagagccggaagcgaagcagggcgattacctggtggggacggatgaaaacgtgctggtacttaatcgcacttatgccaaccggagcaacgccgaacgagcggcaaaaatgcagtgggaacgcctgcaacgcggcgttgcgtcattctcgctacaactggcggaagggcgggcagatctctacacggaaatgcctgtgaaggtcagtggttttaaacagccgatagatgatgcggaatggaccattacgactctgacacataccgtcagcccggataacggttttacgaccagtctggagcttgaagtgaagattgatgatttcgaaatggaatgattcttcgcaatggagaacttttaagttttcaaaatggaataatgcggtatcattattgtgaatttagcaaaaatggggagaactcgaaaaatgatgatttgcccactgtgtggaagtgccgcccatactcgcagcagttttcaggtatcttcattgaccaaagagcgttacaaccagtgccagaacattaactgcagccatacttttgttacccatgaaacttttgttcgttcgattgcaacgccaaaagagtcaaatccggttcagccgcatccaatgaaatcaggacaggtggcgctctctctttgacgctgccgccaatttgtcgccatcgttaaaaaacagtgcttctaacatcatgattttaaaaggcataaatttcaggcaacaaaaaacccatcaaccttgaaccgaaatggcggggttgatgggctccacaaaatggggacatcaaagaaaagcagtggcactaattaagactgatgccctgcggaaaagttctgcggttgtgcaaaaaaatttcattttcagggcaacttcagttttatcctaatcctggccataccatgacgatgattgtccctgccagcgtcagcaggacgttggcgattgcataggtgcccgcatagcccagcgccgggatgttactgcgagctgtatcactgatgatctccattgccggcgcgcaggtacgtgcgcccatcattgcgccgaacaacagcgcgcggttcattcgcaatacataagcaccgaacaagaaacagataaccacgggcaccagactgacaatcaatccggcaatcaacatctgaccgccaatcgcgcccaggccgttattaataccgctaccggcgctcagaccaacgcctgccataaacaccatcaagccgaactctttcaccatgcttaatgcaccctgcggaatgtaaccgaaggtcgggtggttagcacgcataaagcccagcataattccggcgaataacaacccggcagcgttccccatgccgaaactgaatgtgctgaactggaaggtgatcatcccgatcatcagcccaataacaaagaaggcgcagaatgccagcaggtcagtgacctggctgtgaatcgagataaagccgatgcgatcggcgatggtttttacgcggcgggcatcgccgctgacttgtaaaacgtcacctttgttaagcacgacgttgtcatctatcggcatctcaatctggctacgaatgacgcggttaaggaagcaaccgtgatcggtcaacttcagttgtgcgagacgtttacctacagcgttatggtttttaacgaccacttcttcagtgacgatacgcatgtcgagaaggtcacgatcgaaaacttctttaccgttacggaagctgggatcgagtcgggcatgggcgtcgggatagcctaccaacgctatttcatcgcccatttgtagcacggcatcaccgtctggatttgccagaatcccgttacgtcgaatacgttcaatgtagcagccggtttgtcgataaatacccagttcacgcagatttttgccgtcggtccaggccaccagttccgggccgacgcgataggcgcggatcaccggtaaataaaccttacggttggcatcagtgtccaggccacgttcgcgggcgatttgctgggcgctggtctgtaagtcctgatgctgcaatttcggcaagtaacgcgcaccaacaatcaaactcaccagaccgattaaataggttaaggcatacccgaggctcagattatccagtgccagtgagagctgcctgctttccatgccggaatgacgcagtgtatcgccagcaccgaccagaaccggtgtcgacgtcatagagcctgctaacataccggccgtcaggccaatatcccagccaaacagcttacctaaccctaaggcgatcaccagcgcactgccaaccatcaccagtgctaacattaggtaatttttcccatcgcgaaaaaaaatggaaaaaaagttcggtccggcttcgaccccgacgcagaaaataaacagcataaagccaagattaagcgcatcggtgttaatgctgaaatgttgttggcctaataacagcgatacgactaaaacgccaatggaattacccagttggatcgaaccaagtcgtaactttccgagacatagcccaagcgcgaggaccacaaataataacagaatgtaattcccatttaacaattcggcgacgtttatattcacggaggctaacttcttgtttactagtaagctgttgaaagaaatggtaatttacgataatgttttttaccagaattcagggcgcagattcattcagcgcacctaaacgatagtaaagtaacaatatattttactagtgtaatcacattaggtatcaacggctatatgaattgcgttggcctatattagcatggaatgcgaagcggctttatcttactgaacgccacactggcgaaaaatgtgttcgatagacgcagtgtcaggaggaacgagtgaaacataaacaacgttgggcgggggcaatctgctgttttgtcctcttcattgtggtgtgcctttttctggcgacgcacatgaaaggcgcttttcgggctgccgggcatcctgaaatcggcttgctatttttcattcttcctggagcagtcgccagcttcttttcacagcgtagagaagtcctgaaacctctgtttggcgcaatgctggcggcaccctgttcgatgctcattatgcggctgtttttttcaccgacgcgctcattctggcaagagctggcatggttactaagcgcggtgttctggtgtgcgctgggggcactgtgtttcttatttatcagtagtttgtttaaaccacagcacagaaaaaatcagtaaagccctcaacgcgagggcttgtcagacgatcaggcgtccagattttctttcacccatgcagcaaaatcggtatagccgccgatatgttgctgatcgacaaaaatctgcggcacggtttctacgggtttacctgccttttgttgtagatcttctttagtgatcccttccgcacgaatatctacatactgatactgaaaatcatcgcgttcattgctcaatttctcagccagatcttttgcacgcacacagtaagggcaacccgaacgaccaaaaataacggtttgcattatttctctcctcatagatttatgcctgtaatgatcacgctaaaatgtattcgctgaaagtaggtttaacctgttgcattaattgctaaaagctataactgttaaacacaatacagtgaaaagttttagactgaaggctcactttgcagagggaagcgtatgcgcgcgatcggtaaattgcctaaaggcgtgttgatactggaatttatcggaatgatgctactggcggtggcgctgctgtcggtaagcgactccctgtcgctgcctgagccattttctcggccagaagtgcagattctgatgatttttctcggtgttttgctcatgcttcccgctgcggtggtggttattcttcaggtggcaaaacgtcttgccccacagctgatgaaccgtccaccgcaatattcacgttcagaaagagaaaaagataatgacgccaaccattgaacttatttgtggccatcgctccattcgccatttcactgatgaacccatttccgaagcgcagcgtgaggcgattattaacagcgcccgtgcgacgtccagttccagttttttgcagtgcagtagcattattcgcattaccgacaaagcgttacgtgaagaactggtgacgctgaccggcgggcaaaaacacgtagcgcaagcggcggagttctgggtgttctgtgccgactttaaccgccatttacagatctgtccggatgctcagctcggcctggcggaacaactgttgctcggtgtcgttgatacggcaatgatggcgcagaatgcattaatcgcagcggaatcgctgggattgggcggggtatatatcggcggcctgcgcaataatattgaagcggtgacgaaactgcttaaattaccgcagcatgttctgccgctgtttgggctgtgccttggctggcctgcggataatccggatcttaagccgcgtttaccggcctccattttggtgcatgaaaacagctatcaaccgctggataaaggcgcactggcgcagtatgacgagcaactggcggaatattacctcacccgtggcagcaataatcgccgggatacctggagcgatcatatccgccgaacaatcattaaagaaagccgcccatttattctggattatttgcacaaacagggttgggcgacgcgctaaaaccgccacgtcgatgtatgatacgcgggcttttgaccaggtctgacagagaggtgcagggtgaaaattgccatattgtcccgggatggaacgctctattcgtgtaagcggctgcgtgaagccgctatacagcgcggtcacctggttgaaattcttgatccgctttcttgctacatgaacataaatcctgcggcgtcttctattcactacaaaggccgcaagttaccccattttgacgcagtgatcccgcgtattggcaccgccattaccttttatgggacggcggcactgcgccagttcgagatgctggggagctatccgctcaatgagtcggtcgccattgcccgggcgcgtgacaaattgcgttccatgcaactgctggcgcgtcagggcatcgacctgcctgtcacgggcattgcgcattcgccggatgataccagcgatttaatcgacatggtcggtggtgcgccgctggtggtcaagttggttgaaggcacgcagggaattggcgtcgtgctggcggagacgcgtcaggcggcggaaagcgtgattgacgctttccgcggtctgaacgcgcatattctggtgcaggaatatatcaaagaggcgcaagggtgcgatatccgctgtctggttgttggcgatgaagtggtcgctgcgattgaacggcgggcgaaagagggcgattttcgttccaatttgcatcgtggcggcgcggcaagcgtcgccagtatcacaccacaggagcgtgaaatcgcgataaaagccgcgcgaacgatggcgctggacgttgctggtgtggatattctgcgtgctaatcgcgggccgttggtgatggaggtgaatgcgtcgccggggctggaaggaatagaaaaaaccaccggtatcgacatcgcgggtaaaatgatccgctggatcgaacgccacgctacgacagaatattgcctgaaaacgggtggttagtcgcaatcacattactgatcatggttttgcctgcgctttttgcgtaagctgtgccggtctttttatcgaaagaggttgtacaaaattatgacatcgctggtcgttcctggtctggatacgctgcgtcaatggctcgatgacctggggatgagtttttttgaatgtgataactgtcaggctctgcatctgccccatatgcagaatttcgacggtgtctttgatgccaaaatcgatctgatcgataacacgatcctgttttctgccatggcggaagtccgaccttcagccgtattgccgctggcggcggatttatctgccatcaatgccagttcgctgaccgtgaaagcatttcttgatatgcaggatgataatctgccaaagctggtggtttgccagtctttatccgttatgcagggcgtaacctatgagcagtttgcatggttcgtgcgtcagagcgaagagcagatttcgatggtcattcttgaagctaatgcccatcaactgctgttaccgactgatgatgaagggcaaaacaacgttaccgaaaactatttcctccactgataactcctttcgagcacgcagtcgctggtgcagtggctgcgcgctgcaaaattatctgctgtttttaaccttttcttaaagattatttcacttctcttgtgtcgatttggctttatcacatagagcaaatatgcataaaaatttgttaaataccgttttttaatccgagctatagtctcaaaccctggctaaagttattcttgcgatgcttttatatagcgagcagtgctggccgggagaaagttctcttttcttacaccgcgccgataaaaaatatgcacgtttattgcatatctttcagtgtgacaacttttgttcgtttgttaacgaactttcagaaggaaagagatatgaccgccttaaataaaaaatggctatcgggtctggttgcgggtgctctgatggccgtctctgtcggcacgctcgcggctgaacaaaaaacactccacatttataactggtctgattatatcgccccggacacggtggccaattttgaaaaagaaaccggtattaaagtcgtctacgatgttttcgactctaacgaagtactggaaggcaaattaatggccgggagtaccggctttgatctggtggttccatctgccagctttctggagcgccagttgactgcgggagttttccagccgctggacaaaagcaaattgccggagtggaagaatctcgacccggaactgctgaagctggtcgccaaacacgatcccgacaataaatttgctatgccctatatgtgggcgacgaccgggattggctataacgttgataaagttaaagcggtgctgggcgaaaacgcgcccgtcgatagctgggacttgatcctcaaacctgaaaatctggaaaaactgaaaagctgcggtgtctctttcctggatgcgccagaagaagtttttgctaccgtgttgaattatctcggcaaagatcccaacagcactaaagcggatgattacaccggaccggcaacagatctgctgttaaagctgcgcccgaacattcgttatttccattcatctcaatacattaacgacctggcaaacggcgatatttgcgtcgctatcggctgggcaggtgatgtctggcaggcgtcaaaccgcgcgaaggaagcgaagaatggagtgaatgtctcgttctcgattccaaaagaaggggcgatggcgttctttgatgtattcgccatgcctgcggatgccaaaaacaaagacgaagcctatcagttcctgaattacctgctgcgcccggatgtagtagcgcatatttccgaccatgtgttctatgccaacgccaataaagcagccacgccgctggtgagtgcggaagtccgtgagaacccgggtatttatccgcctgcggatgttcgtgcgaatctgttcactctgaaagtgcaggacccgaaaatcgaccgtgtgcgcacccgcgcgtggaccaaagtgaagagcggaaaataatccgcagccttagatgccgggcgggcgcaccacacccgccggcaattcgcaccatcatggtgcgcttgcacacattcaatgccggagagcagccgtgaatgacgctatccctcgcccgcaggcgaaaacccgtaaggcgctgacgccgctattagaaatccgcaacctcaccaaatcctacgatggtcaacatgcggtggatgatgtcagcctgactatctacaaaggtgaaatcttcgcgctgctgggcgcttccggctgtggtaaatccacgctgctgcgtatgctggcaggttttgaacaaccctctgccggacagattatgcttgatggcgtcgatttgtcacaggtgccaccttatctacgccccatcaatatgatgtttcagtcttacgcattgtttccccatatgactgtggagcagaacatcgcctttggcctgaaacaggacaaactaccgaaagcggaaattgccagccgggtcaacgagatgcttgggctggtgcatatgcaggagttcgccaaacgcaaaccgcatcagctttccggcggtcagagacagcgtgtggcgctggcccgaagccttgccaagcgcccaaaacttctgctgctcgacgaaccgatgggcgcgctggataaaaaattgcgtgaccggatgcagcttgaagtggtggatattctggagcgcgtcggtgtgacctgcgtgatggttactcacgatcaggaagaggcgatgaccatggcggggcgcatcgccattatgaatcgtgggaaatttgtccagattggcgaaccggaagagatctacgagcatccgactacccgctatagcgccgaatttattggctcggtaaacgtctttgaaggcgtactcaaagagcgtcaggaagatggcctggtgcttgattcgccggggctggtgcatccactgaaagtcgacgcggatgcctcggtggtcgataacgtgccggtacatgtggctctgcgcccggaaaaaatcatgctttgcgaagagccgcccgccaatggttgtaacttcgcggtgggggaggtgatacatattgcctatctcggcgatctttcggtgtatcacgttcgtctgaaaagtgggcagatgattagcgcccagctacaaaacgcccatcgtcatcgtaaagggttaccgacctggggcgacgaagtgcgtttgtgctgggaagtggacagctgtgtggtgctgacggtttaaggagcaaagatgaatacacttgaacctgctgcccagtcgaaaccgccgggcggatttaagctgtggttgtcgcagctgcaaatgaagcatgggcgcaaactggtcattgcgttgccatatatctggttgatcttgctgtttctgctgccatttctgatcgtctttaaaataagtctggcggagatggcgcgcgccattccgccttataccgaactgatggagtgggctgacgggcaactgtccatcactcttaatctcggtaatttcctgcaactgaccgacgatccgctctatttcgatgcttatctccagtcgctacaggtggctgcgatttcgacattttgctgtttactgatcggctatccgctggcgtgggcagtggcgcacagtaagccttcgacccgtaatatcttattactactggtgatcctgccgtcgtggacctcgtttctgattcgtgtctacgcctggatgggaatattaaaaaacaacggtgtgctgaataattttctgctgtggctgggggttatcgatcaaccgctgaccattctgcataccaatctggccgtttatatcggcattgtttacgcttacgtgccgtttatggtactgccgatttataccgcgttgattcgtattgattattcgctggtggaagcagcgctggatctcggtgcacgaccgctgaaaacgttctttaatgtgatcgtgccgctgactaaaggtgggattattgccggatcgatgctggtgtttatcccggctgtgggcgagtttgtgatcccggaactgctcggtggcccggacagcatcatgatcgggcgcgtgctgtggcaggagttctttaacaaccgcgactggccggtggcctcggcggtagcgatcatcatgttgctgctgctaattgtgccgataatgtggtttcacaaacaccagcaaaaaagcgtgggagaacacggatgaataatttaccggtagttcgttcgccctggcggattgtgattttgctgttgggcttcacctttctctacgcgccaatgctgatgctggtgatctattcattcaacagctcgaaactggtgacggtgtgggccggctggtcaacgcgctggtatggtgagttattgcgcgatgacgcgatgatgagtgcggttggtttaagcctgacaattgctgcctgtgcggcaacggcggcggcgatcctcgggactattgcggcggtggtgctggtgcgctttggcaggtttcgcggatcaaatggctttgcctttatgatcaccgcgccgctggtgatgccagatgtcatcacgggcttgtcgctgttgttgttattcgtcgcgcttgctcatgccattggctggcctgcggaccgcgggatgcttaccatctggctggcgcatgtcacgttctgtacggcttatgtggcagtcgttatttcgtcgcgtctgcgggaactggatagctcgatagaagaagcagcgatggatctcggtgcgacgccgctgaaagtatttttcgtcattacgctaccgatgatcatgcccgcgatcatttctggctggttactggcttttactttgtcgcttgatgatctggtgatcgccagctttgtttctgggccgggagccaccacgttaccgatgctggtcttttccagcgtgcggatgggggtgaatccggaaatcaacgcccttgcaacgttaattctcggtgcggtcggaattgtcggatttatcgcctggtatctgatggctcgcgcagaaaaacagcggatacgcgatatccagcgtgcaagacgtggctgaagacactaaaatttgccaacctggctacataatgccgcgcatgccgcggcattgttttcatggaagacgaaacgttgggattttttaagaaaacatcttcatctcatgctcgcctgaatgtgcctgcgctggtgcaggtagcggcgctcgccattattatgatccgtggcctcgacgtgctgatgattttcaatacgctgggcgtgcgcggtattggcgagttcattcatcgcagcgtacaaacctggagcttaacgctggtctttttaagcagtctggtgctggtttttatcgagatctggtgtgcgttttcactggtgaaagggcgtcgctgggcgcgctggctatatctgctgacacaaatcaccgccgcaagttacttgtgggcggcttcgctggggtatggttatccggagctgttcagcattcccggtgaatcaaaacgtgaaatcttccatagcctgatgctgcagaagctgccggatatgctcatcctgatgctgctgttcgttccctcgaccagtcggcggttcttccagttgcaataatgtgtataatcgtcggccctgatgatgtgaaggtcaatgtatgcagtgcgcactttacgacgcgggtcgctgtcgttcctgtcagtggataacgcagccgattccagagcaactctccgctaaaaccgccgatcttaaaaatctgctcgccgattttccggtcgtggaatggtgcgcgccggtgtcaggcccggaacaagggtttcgtaataaagccaaaatggtggtgagtggtagcgttgaaaaaccactgctcggtatgctgcatcgcgacggcacaccggaagacctttgtgactgcccgctttatcctgcctcatttgcgcccgtttttgcggcgctaaaaccgtttatcgcccgagcggggctaacgccttataacgtggcgcgtaagcgtggcgaactgaaatacattctgctgactgaaagccagagtgatggcggcatgatgctgcgctttgtactgcgttctgataccaagctggcgcaactgcgtaaggcgctgccgtggttacacgaacaactaccgcagctgaaagttattaccgtcaatattcagccggtacatatggcgattatggaaggggagacggagatctacctgaccgaacaacaggcactggcggagcgttttaatgacgtaccgctgtggatccgtccgcaaagtttcttccagactaatccggcggtcgccagccagttgtacgccaccgcgcgcgactgggtacgacagctgccggttaaacatatgtgggatctgttctgcggtgtggggggctttggtttacactgcgcgacgcctgacatgcagttaaccgggatcgaaattgcatcagaggccattgcctgtgcaaagcagtcagccgctgaactgggcttaacgcgtttgcaatttcaggcgctggactccactcagtttgccaccgctcagggggatgtgccggagctggtgctggttaacccgccgcgccgcggcattggtaaaccgctgtgtgattatctctcaacgatggcaccgcgttttatcatctactccagctgtaacgcccaaactatggcgaaagatatccgcgaactgcctgggtttcgtattgaacgggtgcagcttttcgatatgttcccgcataccgcgcactatgaagtgctgacgctgctggtgaagcaataaaaaagccgcatgtgcggcttcagattgctgacaaagtgcgcgttgtttatgccggatgcggcgtaaacgccttatccggcctacaaaagcgtgcaaattcaatacattgcatgggccatgtaggcctgataagcgtagcgcatcaggcaattttacctttgtcatcagtctcaagccgcggttgcggctttctgaatcttactgtgggaaccactggtcactgattttttgataagtaccgtcagctttaattgctgccagcgcgttattcagtttttccagcagggctttgttatccggacgtacagcgatgcccaggccggtgccaaaatattgcggatcggtcactttctcagtagcaacaccaagttgtggattggttttcagccattcgtttaccaccgctgtgtcaccaaataccccatcaatacgaccatttttcagatcgataaaggcattctgataactgtcataagagacagttttcacttccgggtgctgatcctgaatatatttctggtgcgtagtaccgttttccatcccaatacgtttgcctttcagatcggcaaacgttttgtaggtatcttttttggcaatcacgacggctgagttttcatagtagggcgtggtaaacgatacctgtttgctacgctccggggtgatatccataccggagattacggcgtcatattttctgaatttcagggacgggatcaggctgtcgaacgcgtgattagtaaaagtacattctgcctgcatttgtttgcacaaggcttttgccagatcgatatcaaagccgacaatctcattattagcacctatagattcaaagggtggataggtggctgaaacgccaaaattgattttctctgcggcagaagcaccgaaagtaaaggaagcaagtaaagcggcaagaactaactttttcatgatggaactcccgtctgtcaatcttatgatttttggccgtgtctgcggcatgggataacaatgccatcaagtgaatttatatgcaataaacatgattaaataatttaaatgaaataaaaaagacggacaacttagtgggttgtccgtcttcattataagaatttatgcactatgtaggccggataaggcgtccccgccgcatccggcacaggcaccgtgctgatgtctgatgcgacgctggcgcgtcttatcagacctacaaaaccccccggcgaatgtacgcagccacattaatttcgccgttcgaatgccagcgctttgcgctcgatcagacgcatcatcagcgtcagcaggccgttaacgaccaggtaaataatccctgccgcaccgaacaccattacatcgtaggtgcgtccgtacaacaactggctgtatcccatcacttccatcagcgtaatggtgtatgccagagaggtacttttgaataccagcaccacttcgttggaataagaagagagcgagcgtttaaaggcatacggcagcaggatcgccagcgtatcttttttgctcattcccagggcgctacaggactgccactgaccttccgggatcgcacgaattgcaccgtaaaacagctgcgtggtatacgccgcactattcagcgacaacgcaatcagcgcacataaccacggttctgacaacaaatgccacagtgccggatactcctgcaaagtcggaaactggcccggcccgtaataaatcaggaagatctgcaccagcagcggcgtaccggtaaacagcgtgatataaccccgcaccagccacaccagcaccggcgttttcagcgtcaggatgatggtaaaaatcaatgccagaatcagtgccacaatcagcgaggcaacggttagcgtcaggctggtgtgtagccctttcatcagttcgggtaaatactcaaacattagctgggcctccgctcaaaacgtgtcgcgcgcaggtcaatgcgtttgagaatgtactgactgagcagggtgatcaccaggtaaatcgccgccgccacaatgtaccaggtaaatggttcctgggtacgagtagcgatgctttttgtttgcagcattaaatcattcacactaatcaaactgaccagcgcggtatctttcagcagcaccagccactggttaccgaggccaggcagcgcatgacgccacatctgcggcatcaccagacggaaaaagatagccgatttcgacagccccagcgcctgaccagactcccactgacccaccggcaccgctttcaacgcgccccgaagcgtttgcgaggcataggcggcatacagcagtgacagagcgatgacaccacaaaggaacgggctaacgtcgaagttctcaatgtccatctgcactgggatctgcacgaacccaagattgatagtgaagccatccgaaagcgtcagcagcagctgcgaggagccaaaatagataaacagcaccaccagaatttctggcaggccacgcagaatggttaccagcgctgaacctgcccacgcgacaggacgccattttgccgactcccataccgcaaagaacatcgccagcgccagcccgacaatcaatgcacaaacggcaaggccgacggtcatcccggcggcgcttgctaaaggaaaaaattcattcatcaggaattacttctggaaccatttgttgtagatggtttcgtaagtgccatctttcttcactttttccagcgcagtgttgagtttctgctgcagctcagtgttgccctgacgtaccgcgatgccgaggccagtgccgaagtaatctttatcggtcactttgtcgcccaccgccgccagtttcgggttatctttcagccactcagtgaccactgcggtgtcaccgaagacgccgtcgatacgcccgttttgcagatccagttttgcgttctggtagctgtcatacggaacggtagtgatttccgggtgcttatccataatgaatttctggtgtgtcgtcccgttctgtacgccgacttttttgcctttcagctgatcaacactggtgtatttgccttgctgacccacaaacagggcagagttgtcatagtacggggtggtaaacagcacctgcttttcacgctccggagtgatatccatgcccgccatcacggcttctacgcgacggaatttcaggcttgggatcaggctgtcaaacgcctggttagagaaagtgcaggttgcatcaatctctttacacagcgcttgtgccaggtcgacgtcaaaaccaacgatctggttgtttgcatcaatcgattcaaacggaggataggaggcttcggtagcaaaacgaatggtttcggcagctgtggcggaaagactaaaacctgcaattaacgcggcaatcagaacttttttcattgttgttatcccgaatcttagtgagagagatagtttttaaatgcttcggtttgcggctcggtaaagcagctcgcgtcgccttgttctacgatatgaccattttccatatacaccactcggctggcggttttacgcgccacttcaacttcgtgggtgacgatcacctgggtaatattcgtttctgccagctcacgaatgatgctgacgatttgtgccgtaatttccgggtccagtgcggcggtcggttcatcgaacagcagtacctgcggttccatcatcaacgcacgggcaatagcaacacgctgctgctgaccaccagaaagatgcagcgggtaacgatcgctataaggtttgagacgcagacgttccagcagtttttctgcacgggccagcgcctgatctttactcaaccccagtacacggcagggcgcttcaatcaggttttgctgcacggtcagatgcggccacaggttgtattgctgaaacaccatgccaacgttacgacgcaaatcgcgaatcgctttgtcagagggtgttttggtgaaatcgaaatggttgcctgcaatgttgagcgtaccggagcgcggcatctcaagcagattgagtacacgcagcagcgagcttttacccgcgccgctggggccaagtaacaccagcgtttcgccctgtgggcaatccagcgtgatatcgaacagcgcctgatgcgcgccgtagaagcaattaatgccgtttaattgaatactcattgacactcgtatactggcagtctgatagctattgaggtcgaagatagtacctttgacagaataattatgcaatatttctgctttaaaagttaaaagcaaagcgcattattcaataaacatagcacaaaataacgggggcggtggtcggcgagcataaatgtcggcattcctcacgaaatgccggacaatttacggggtttattggttgatcaaggcgttagcgattctcgatggactgacggagcgtacccgccgtggcatgaacgctaccgcctaagtaacgcacatcgtcgatgacccaacactggccttcctgaatcattaacacttcatcctgccaaccctggtcaccctgtttgagatccacgcgcaatggaatgttacgggcatcacgattagggatagtcgatgcactggcaacgtgggcgctatctggcaaggtggttcgactggagaatggatcgttggtcagtagttcccgatggttattatcccgggaggcatcgctaagcagtgtcgccagtttgtcgctcagataagggcgcaaggcggtgatgtcgttgctgcggtgcaaaatgcggtagtcataaaattgctgggccacgttatccgggcctccttcaacgcaaggaccactgcgtgtgccgttatctttataagctggagtgactgtggtgcaggcactgaggagcagtgcgcaggggataagcattgtcaatttgctgtagcgcataatgatttccttataagcgatcgctctgaaagcgttctacgataataatgatatcctttcaataatagcgtatcagtctgataatgcttttgagatcgaaggcttagcaaacaaggagatcgatcatgcaattttctacaaccccaactctggaaggccagaccatcgttgaatattgcggtgtggtgaccggcgaagcgattttaggtgccaatattttccgtgatttctttgccggtatccgcgatatcgttggcggacgttccggtgcgtatgaaaaagaactgcgtaaagcacgggagatcgcctttgaggaattaggctcccaggcgcgggcgctgggggccgatgccgtcgtcggtattgatatcgactacgaaacggtcgggcaaaacggcagtatgctgatggttagcgtcagcggtacggcggtgaaaacgcgtcgatgagaagattcttctggctggtcgctgccgctctgttattggcagggtgtgcaggcgaaaaaggcattgtcgagaaagagggatatcagcttgatacccgacgccaggcgcaggcggcgtatccgcgcattaaagtgctggtgatccactacaccgcagatgattttgatagctcgctggcgacactgaccgataagcaggtcagctcgcattatctggtccctgcggtaccaccgcgatacaacggtaaaccgcgcatctggcaactggtgccggaacaagaactggcctggcatgcggggattagcgcctggcgcggggcaacgcgccttaacgacacctctattggcattgagctggaaaaccgtggctggcaaaaatcggccggagtgaaatattttgccccgtttgaaccggcacagattcaggcgcttattccactggcgaaagatattattgcccgttatcacatcaagccggaaaacgtagtggcacatgcggatatcgcaccgcagcgcaaagacgatccggggccattatttccctggcagcaactggcgcagcaggggattggtgcctggccggatgcgcagcgggttaacttttaccttgccgggcgcgcgccgcacacaccggtagataccgcgtcattgctggagcttttggcgcgctacggttatgacgttaaacctgatatgacaccgcgcgagcagcggcgcgtgattatggcattccagatgcatttccgcccgacgttatataacggcgaagcggatgcagaaactcaggcgattgccgaagcattgctggagaaatacgggcaggattagcgcggcagttttccgtggtcgcgtagccaggcggcagttttctcgataccttcatccagggtgatgaccggctgataacctaactcttcctgcgcacgcgtaatatccagcgtaaagtcaaaattcaacttggagacgccgtagtgggtcagcggcggctcttttgctgacttgcggcctaaacgctccatgctgcgggcgatcatatccagcatcgggtaggggacggaacgaatacgacagtcaatattcaactcgtcgatcagcttctgcacgatgctgcgcagtgtgcgatgctcgccgttggtgatgttgtacacacgcccggaaggtagcttatcgcaggcttcctggcttgccagccacattgcgtgcacggcattttcatagtaggtcatatcgaccagcgcactgccgccatgcggtaacagaatactgccgtagtggtgcatcatatgcgccagacggggaataaagactttatcgtgcggtccgaacagactttgtgggcgcagaatagtaaagcgcgtttgtggattcgcctgcgaaagcatattgatcacttcttcgctggctgctttgctgcgggcaaactcgttggcgaagcggtgagggcgaaaatcttctttaatatcgcgatggtggtgataatcgaagtacagggagggggaagagatatgaataaagttacgcacaccccaggcgacagcccattcacccaggcggcgagtggcgcgaacgttagccagatcgaaagcctgttgtgtcccccagggtgaggtaaagctggagcagtgccacagcgtatcaatgcccgcgagcatcactttagcttgtgatgaaaccagctcggtcagatccgccggaacaaactctgcgcccattttttccagcaatttgcccattgcctcgttgcgaccggtcgctcgcacgctgatgcctttctggcataaaaactctaccgcgtttcgacctaagccgctggtggcgccggtaaccagtaccttcatatcaatccactgttgttgagaaaataacgtgcgcattcttccgtgatttcccccatgatgcaatgggaaacatgaaagaataacgcaggttttgtcgattaatctgtgctttgttctgccagtctggcgatttgttttgccattccgcgaaaaataaacagatgcgcggggatcatcaataaccagtaaaacagccccggcataccgtgcggatgccagaaagcgcggacatcgatagtacgatagtcgcctttatcttccaggctaaaacacagtcgtcccagccccggcgctttcatgccaaataacaacgtaagttgtttttccggttcaacgacaatcactttccagctatccaccgcatcgccagtctgtaaatattcgcgctccgggcggcctttcgccagcttatgaccgatcgcgcggtccatcaacgcccgtgtctgccacaaaatattgccaaagaaataacgctctttaccgccgatttggttcactacctgccataaagcagcaaggctggcggacgttttaacggtaaaccccgcctgtttggcaaaataaccgtactccggtcgccagcgggcaaaggcctgagcgtcgtagccccagtcgctggagttgaccagtttttcctcctctttcaacgtgctacgtaccgcgtcatcgaaagcgatcagccgttgtgggatgagtgcacgtagcgcggtatcatccgccagcagatcgtgtttcagcccctgaatcaacgccctggcggtggtgggcggtacggaagtaatcacattgagaaaccacaccgaaatccagcgggtggggagggggatggggatcaaccagcggcgcttaccgctcaccgccataaaatgttcaaactgttgctgataactgagcacctctggtccggcggcttcgaagatgcggtgttcgctggccggatgatctaacaacgccaccagatagtgcagcaagttttccagcgcgatgggcgtggtgcgtgaacgtacccagcgtggcggcgttaacactggcaggttgtagaccatatcgcgcatgacttcgaacgccgctgaacctgcgccaacgataattccggcccgaagttcggtcacaggtacattcgcttcacgaagaatgtccgccgtagcctgacgagcacgcagatgatccgactgctcatgtggcggggcctgcaacgaactgagaaagattaattgcttaactggtacttcacgtagcgcatcgcggacgttgagagccacctggcgctcctgagcgataaaatcgccgccttcgcccatgctgtgcaccagaaaatagacggtatcgatatcctgcaacagggccggaaggttatccggccagctgagatcgactttatggcaactgacgtttgccagttgcagctttgcaagcctgtcgacatgacgtgccgccgccaggatctgatgcccttgccggctgagtgtgcgcaccagatgctgaccaatgtagccactggcaccgagaactaaaatgcgttgcggcacgtctctctccttaacgcgccaggaatgcgcgccagtgggcggcgacttccgccagttgttcgcgcgagacgtcaagatgcgtcaccaggcggacaatcggcgaggcgttaatcagcacgtttctcgctttcatgtattcgcctaacgcggcagcattttcttccccgacgcgaacaaacagcatattagtgtcctgacgcatcacatccgcgcctgcttcacgcagttgctccgccatccaggcggcgttgtcgtgatcttcctgcaaccgtgcgacgttatttttcagggcatacatcccggcggcagccagaatcccggactgacgcatcccgccaccggccattttccgccagcggatggcacgtttaatgtaatcacgattaccgacgagtaatgaaccgactggcgtcccaagacctttcgacaggcaaatggtgaacgaatcacaatattgcgtgatctctttcagttcgcagccgtaagccaccacggcattaaagatgcgcgcaccgtcaacatgcagcgccaaattgcgctcgcgggtaaattcccatgcttctttcaggtattcacgcggcagcactttgccgttgtgggtgttttccagactgagtaatttggtgcgggcgaaatggatatcgtcgggtttgattttcatcgccactttatccagcggtagcgtgccgtcggcagccgcgtcgatgggttgcggctgaatactgcccagcaccgctgcgccaccggcttcaaacagatagttatgcgcggcctgaccgacaatatactcttcgccacgttcgcagtgactgagcagagcgaccaggttggcctgagtgccggtaggcagaaaaatggcggcttctttaccggaaagctctgctgcgtagtcctgcagagcattaacggtagggtcgtctccgtaaacgtcgtccccaaccggggcggccatcatcgcttcgagcatggcgcggcttggtcgggtaacggtatcactgcgtaaatcaatcatggcatgtccttattatgacgggaaattccaccctttttaccttagccagtttgttttcgccagttcgatcacttcatcaccgcgtccgctgatgattgcgcgcagcatatacaggctgaaacctttggcctgttcgagtttgatctgcggtggaatggctaactcttctttggcgaccaccacatccaccaacaccggaccgtcgatggagaaggcgcgttgcagggcttcatcaacttcagacgctttttctacacggatacccgtaatgccgcacgcttcggcaatgcgggcaaagtttgtgtcgtgtagttcggtgccgtcagtcaaatagccaccagctttcatctccatcgccacaaagcccagcacgctgttgttaaagacgacaattttcactggcagtttcatctgcactactgagaggaaatcgcccatcaacatgctaaaaccgccatcgccgcacatggcgaccacctgacgttctggctctgtcgcctgcgcacccagcgcctgcggcatggcgttagccatcgaaccgtggttaaacgaacctaacaggcgacgcttgccgttcatttttagataacgtgccgcccacaccgttggcgtaccaacgtcacaggtgaaaatagcgtcatcggcggcaaaatgactaatttgctgcgccagatattgcgggtgaatggctttctcgctcggtttagctaaatcgtccagccctttgcgggcgtcgcggtaatcttccagcgctttatccagaaacttgcgatcggctttttcttccaccaatggaagcaatgcacgcagagtcgacttgatatcgccgaccagtgccatatccaccttgctgtgagcgccgatgctggctgggttgatatcaatctgaatgattttggcatcggtcgggtagaaggcgcggtagggaaattgcgtgccgagtagcactaacgtgtcggcgttcatcatggtatggaaacctgacgagaagccgattaacccggtcattccaacatcatacggattatcgtattcgacatgttctttaccgcgcagggcatgaacaataggcgctttaattttcccggcaaactcaactaactctttatgcgcccccgcgcagccgctgccacacatcagggcgatattgctggaataacgcagcagttgcgccagtttgcgtaactcttcttcttccggcgtcacgactggttgtggcgcatgataccagtgcatggttgccccttctggcgcaggttttaacgccacgtcgcctggtaacacgacaaccgaaacgccacggttaagcaccgctttgcgcatggcaatcgccagtacttgtgggatctgctccgggctggaaaccagctcgcaatagtgactacattcgcggaatagctcttgtgggtgggtttcctggaaatagccgctgccaatttcgctggagggaatatgagcggcaatcgccagtaccggaacgtgattgcggtggcaatcgaacaggccgttgattaagtgcaggttgccggggccgcacgatccggcgcagaccgccagttctccgctaagttgtgcttcagcgccagcggcaaaggccgccacttcttcgtggcgggtggacatccactcgatggtgcccatgcgattaagactgtcactaagaccgttcagagagtcgcctgtgactccccagatgcgtttcacccctgccgattcgagtgttttggcgatataagctgcaaccgtttgtttcatggttctccatctcctgaatgtgataacggtaacaagtttagttcatctgacggagggggaagggatgggagagaaaggaggcactaacggttaaatagcccgatgaaaggaatatcatcgggcataaggcgattatgcgagaaccaaatccccctgcggatggcaggagcaggccagtacgtaaccttcagcgatttcggcgtcggtcagcgtcattgtgctgctcaccgtatattcaccggaaaccacttttgtcttacagcagccgcaaacacccgcacggcaggcagcgacaaccggaacgttattgctttccagcgcctccagtagcgtggtgccaaccggggcgtaaaattctcgtgccggttgcagtttggtgaatttcagaccgctggtcgccgcttctgctactggggtgaagaatttctctttaaagaaacgcgtcacgccgagcgctttcacttcctgctctacccaatccatatacggagccgggccgcaggtcatcacggtacgtgaagctaagtcaggtacacctgccagcagttcgcgagtgagacgaccagcgataaagccttcggtaacgttattttctgccaccagcgttaccggatagttacgccactcatcggcgaaaataacatcctgcggcgtacgcacgttgtagatcacccgcacatcggcctgtggacggttcttcgcaagccagcgacgcatcgacataatcggcgtgacgccgcagcctgccgccagcaacaggaatttatcttctgctttatcgtcgcaggtaaattcccccatcgcgtccgaaagccagagataatcaccgcgttttacatcgcgcgtcagccactgggagccgacaccgtcatcaatccgccgcacggtcagggtgatatattcactcacgcctggcgtggaggaaatggtgtaagcacgcagcgtttccgctgagtttcgcacgctgaccagtgcatattgcccggcgcgatatgggtagtaatcgtggcaaatcagggaaatcgtccacacatccggcgtttcttgcgtaatgtgatgaacctgcatccgccacgggcattgattcgttggcatcgtcatcgacaaactccttacgcgctcaacagttgcttcatgtcttcttcaacagtggtgatagaacgcaggccgaatttctcgttcagcaccgccagcaggtctggtgtcaggaaaccaggtgcagtcgggccggtgacgatatttttcacgcccagagaaagcagcgtcagcagaatgacgatcgctttctgttcaaaccaggagagcaccagcgacagcggcagatcgttgacaccgcagcccagtttctctgccagagtgacagccagaataatcgctgagtaagcatcgttacattgacctgcatctaccagacgcggcagaccttcgatatcgccaaactcaagtttgttaaagcgatatttaccacaggcgagggtcaggatcaggcagtcatccggcacgctggtggcgaaatcggtgaagtagtggcgctcgccgcgtgcgccgtcacagccaccaagcaggaagatatgacgcagtttttcacggctcaccagatcaatcagcgtatcagcagcgccaagcagcgtctggcgaccaaaacccacggtgataaggtgcggaatttcgctgtacgggaagcctgccatctgttgcgcctgggtgataaccgcagagaaatcatcaccgtccagatgacgcacgccaggccagccaacaatgctgcgggtccagatacgatcgtcataagcgcctacggttgggtcgatgatgcagttcgaggtcatcacgatggggccagggaaacgagcgaactccacttgctgattctgccagccgctgccgtagttaccgaccagatgcttgaatttacgcagctccgggtagccatgcgcaggcagcatttcgccgtgggtgtagacattaacgcccgtgccttcggtctgttccagcaggttgtagagatctttgagatcgtgaccggaaatcagaatgcatttacccgccgtcgctttgacgttgacctgggttggcgtcgggtgaccgtatttaccggtttcgcctgcatccagaatgctcatcactttgaagttcatctggccgatttccattgaacactcaagaagcgcgttcatatcggcaggccaggtccccagccacgccatgattttatggtactgggcataaatatcgttgtcgtattgaccgagaacatgcgcgtgttccatataggccgccgcacctttcaggccatacaggcacagcagacgcaggccgagaatgttttcgccaatcgccgctttatctttgttaggggtaaattctgctgcctgacgttgcagctcgccgagatcgtcgctcaccagttgcaggtcagccatcgggttatcgacgcgcgcgttggcatctacagccaggcattgcgctttcagcgcctcgcgcagggcaatcgcttcacgagcgtagccgacaatacgcggagaatcgaagttaacgttggtcagggttgagaaaaaggcacgtggcgcgaagctgtcaacatcgtggttgatgatgccgtattcacgcgcttttaccgcccaggcagaaagcccttgcagcgccgcgatgagtaaatcctgaaggtcagaagtttccgccgttttaccacacatcccctgcgcgtatgagcagccgtttcctgccggagtacggatagtttgttcacattgcacacaaaacatgatcacaccttttaaagttatatttaatatacatgtttaaggttaagacgcttaacgcggggataaaagggatttttcatgcaactttaagggagattgatttagcgcaattttggcggcagggatctaccgccagagaggtattacgcagagaaaaaggcgatgaggatcggcactaacaggctaagaataaaaccgtgaacaattgccgccgggaccatatccagcccgccagtacgttgaagaacgggcagggtgaaatccattgatgtggcaccgcataagcccagtgcagtagagcggctgcggcgaatcagcccagggatcaacataatagcaatcagttcacgggccagatcattaaaaaacgccgcgctcccgattaccggaccaaaagattcggtcaataaaataccggaaagagaataccagccgaaaccggaggccattgccagcgcggtattgatggggagatcaagaataaaggcgttaattaaaccaccaattaatgaactgacaaccaccaccacggcgacaatcattccccggcgattaaggacaatctgctttaaggtcatgccattattgcgcaactgaataccaacgaggaaaagtagcaaaattaacgtgtattcactggcttcggtcgcgtgttgtaagaaagccagtccacttagaccaatggcaaaaccaatcactactacgccgcacagttttagcgactccagcgccatcgcaatacgcgacgggagtttttcttgctgatggtggttgcgccacggcaggcctcgctccagccacatcagggcggcaatattacacagtaaaataacggtaatactgacggcagaataatgcagaatcgccaacaggttactggcgaggttatcgagaaacgccagactgatacccataaaaaagagaataaggtaaaccatccagcttaatagctgattaataacttttaacgcagcttgttggcgaagcggaatgaggtaacccacaatcaggggaaccagaatgattaacagcccagaaaacatgaaaacccagtccttgcaaagatgaagtcgaaatgcgcgatgacacactactgaaagcggaaggacgagtaaagttgcaattaaaaggaaatgttatgcataaggagcagtagagtattcgttttcatttaaagatattcttgcgctttaattacaaactgcaccgatgttggtggcgtcaaaatcgccgaggcgttccctgaaggccggggcagcccacatggatgtgggctgagggcgcgttttacagggatgttacctcgcgcccgacccggtagccgtaagggataagtcgagggcaccgcgcagcggcgattttgttcgccagagcccgggggtgcagggggcggcggcgattggccgccccctgcgcgctccttgcgccagtggcaatatgttgcttagctcatgaaaggagcgcaacaagatgatgaatcaacatataacaacatcttaaaaaaaggcctgacattacgccaggccttctgcgttaattaatcacgcttttccagcagggtccggtaaatcagaccaccgataatgccgccgacaattggcaccacccagaagaaccacagttgttctaatgcccagccgccctggaagatagcaaccgcggtgctgcgcgccgggttaacagaagtgttagtcaccggaatactaattaagtgaatcagggttaaggccagaccaatagcgatcggcgcaaaacctgccggcgcgaatttgtcggttgcgccgtggatcaccaacaggaaacctgcactcaataccagttcaactaccagcgcggaaagcatggaataaccgcctggtgaatgctcgccataaccgttagaagcaaaaccgctggctgccgcgtcaaaacccgttttaccactggcaattaaatacagcagcgccgctgcaacaataccgccgacaacctgggcaattacgtagccaacgacttcttttgccggaaaacgtccgccagcccataaaccaatagtgaccgccgggttaaaatgaccaccagaaatatgaccaacagcaaaggccatcgtcagaacggtcagaccgaacgccaacgccacgccggcaaaaccaatgcctaattccgggaagcctgcggccagtacagcactaccacagccaccaaaaacaagccagaaagtaccaaaacattcagctgctaattttctgaacatatccacctcaattaaaaattgaccctgtgaaaaatatggtcgttttatagggtcgtcgtaaaaaagtgacgacggaaataatgcgcggctattttaaaaacgaaggcgagtcattcaccagataaataaatccagtaaatttgatttagggcaacagcgggttgccccatatagtcatttgtctgattgacagtgtagtgcacgcaaaagatttaatcctttaggcgtaataaaaaataatttatcatgctaattatttgattttgttgtttttgcagacttatcagcaagagggagtataacgcgattattcgctcatttttcagacatttgccatgcttaaatgtgatgtcatcacgtattagcaaggcctttcccgttatactgccagcgtaaaggataagtcacatatttctggaggggatatgattcttgagcgcgttgaaattgtgggttttcgcggtatcaaccgtttgtcgttgatgctggaacaaaacaacgtcctgattggggagaacgcgtggggtaaatccagcttgctggacgccttaactctgctgctatcgccagaatcagatctctaccattttgagcgcgacgatttctggttcccgccgggagatatcaacgggcgagaacatcatctgcatattattttgaccttccgcgaatcgctgccaggccgacatcgggttcgccgttatcggccgctggaagcgtgctggacgccatgcaccgatggctatcaccgtattttttatcgtctggaaggggagagtgcggaagacggcagcgtgatgacactgcgcagttttctcgataaagacggacatccgattgatgtcgaggatattaacgatcaggcacgccatctggtgcgtttaatgccggtgctgcgcttgcgtgatgcccgttttatgcgccgtattcgtaacggcacggtgccaaatgtccctaatgtggaagtcaccgcgcgccagctcgatttcctcgcccgtgagttatcctcacatccgcaaaatctctctgatgggcagattcgtcagggactttccgcaatggtacagctgcttgagcattatttctctgagcagggggccggacaggcgcgatatcgtttaatgcggcggcgagccagcaatgagcaacgaagctggcgctatctggatatcatcaaccggatgattgaccgacctggtgggcgctcgtatcgggttattttgctcggcctatttgctactttgttgcaggcaaaaggcacattgcgactggataaagacgcccgtccattgttgctgatcgaagatccagaaacccgtttacaccccattatgctttcagttgcctggcatctgttgaatcttctgccattgcagcgcattgccaccaccaactcgggtgagttgctttcgttaacgccggtagagcatgtttgccgactggtacgtgagtcctcgcgcgttgccgcctggcgtctggggccgagtggcttgagtaccgaagatagccgacgcatatcctttcacattcgttttaaccgtccgtcatcgctgtttgcacgctgctggttgctggtggaaggggaaacggaaacctgggttatcaatgaactggcgcgtcagtgcggacatcattttgatgccgaagggatcaaggtcattgagtttgcccagtccgggctaaagccactggttaaatttgcccgccgaatggggattgaatggcatgtactggtcgatggcgatgaagcagggaagaaatatgccgctacggtacgcagcctgttgaataacgatcgggaagccgaacgagaacatttaacggcgttaccggcgctggatatggaacattttatgtatcgccagggattttccgatgtgttccaccgcatggcgcaaatcccggaaaatgtaccgatgaatctacgcaaaattatctcgaaagcgatccatcgctcttccaaacccgatcttgccattgaagtggcaatggaggcaggacgtcgtggtgtggactccgtaccgacgctgctgaaaaaaatgttctcacgcgtgctgtggctggcgcgcggtcgcgcggattaaccgcgaaacatcgtggccatttgtggctgaatagcgtcgagcatctcatagcgccgacggtattcagcccgttttttactggcgatttcggcaatctcttttcgtgctatctgtgctggaaggcggtaatggcgttcagcatcacatacgccgccaaccgattcccagaaagcgttgtaatcagcgtggatcttgccttctttatcgcgataacgcaggctgcggtaaatatgcgtttcattgctgacggcaataatctgctctacctgcaaacgttgggcaaacagacaggccgcttccatcacgaggcgtttgggaaatagcccgtggcaggctttcgtcgcattctggatttcctgatgtggaatttcccattttgcgccttgcagtccgccaataaacatcgttcttttcccctgatattcacacagggtaaacgtgatctctgccagaggaataccttcgctgttgcggaacaggattgtgctgtcaccttctttatccattgagatcatcatggtcagctcaagcgtgaactgctcgccgtttttgccttccagcttcgccagttgcagcccgggggtattcaaatataagctgaattcttccgccgacatacattcgcggagtaacgcataatggtaacgtaacgcctccagcaattgcttacggctaagattcgccgcaaggtaagggcgatgcagacgcacaggcagtcgcggctggcgcgttaacaatacattgagattaggccagtgggaaagttcgttcatccactcaacgcttaaacgcggcataatcaacgagcgcagcaaaaatttctggcgaaaactacggcgatgccagaatttacccggccgacactgtccacgtgccagactaagaaaaagtgacaggctgctgagagattcagatggcgtaaaggtccgttcagttagctgcgacatattcatgaaatcaatggttatacatggcgtcgatttcaccattgcgtatcttaaccaaacatcaatagtgtgattactaacgtaaattttagggttttgttgatatttcgttgaagttaatgacccggattggcatatggagtattcagaaaatttatgaaaaagcggaaaaccgtgaagaagcgttacgttattgcgctggtgatagtcatcgccggactgattacgttatggagaattcttaacgcacccgtgccgacttatcagacgctgattgtgcgccccggtgatttacagcaaagcgtgctggcgaccggaaagctggacgcgctgcgtaaggttgatgtgggcgcgcaggtcagcggtcagttgaaaactctgtcggtggcgattggcgataaagtaaaaaaagaccagcttttaggggttattgatcctgaacaggctgaaaaccagattaaggaggtcgaagcaacgctgatggagctacgtgcgcagcggcagcaggcggaagcggagctgaaactggcgcgggtgacgtattcccgtcagcaacgtctggcacaaacgaaggctgtttcacagcaggatctcgacaccgccgcgacggagatggctgtgaaacaggcgcaaattggcaccattgacgcgcaaatcaagcgcaatcaggcttctctcgatacggctaaaaccaatctcgattacactcgcatcgttgccccgatggccggggaagtcacgcaaatcaccactctgcaaggccagacggtgattgccgcacaacaagcaccgaacattctgacgctggcagatatgagcaccatgctggtaaaagcgcaggtttctgaagcggatgtaatccacctgaagccggggcaaaaagcctggtttacggtgcttggcgatccactgacgcgctacgaggggcaaatcaaggatgtactaccgacgccggaaaaggttaacgacgctattttctattacgcccgttttgaagtccccaaccccaatggtttgctgcggctggatatgactgcgcaagtgcatattcagctcaccgatgtgaaaaatgtgctgacgatccctctgtcggcgttaggcgatccggttggcgataatcgttataaagtcaaattgttgcgtaatggtgaaacacgcgagcgtgaagtgacgattggcgcacgtaacgataccgatgttgagattgtcaaagggcttgaagcgggcgatgaagtggtgattggtgaggccaaaccaggagctgcacaatgacgcctttgctcgaattaaaggatattcgtcgcagctatcctgccggtgatgagcaggttgaggtgctgaagggcatcagcctcgatatttatgcgggtgagatggtcgcgattgttggcgcttcgggttccggtaaatcgaccctgatgaatattctcggctgtctggataaggccaccagcggcacctatcgcgtcgccggtcaggatgttgccacgctggacgccgatgcgctggcgcaactgcgccgcgagcatttcggctttattttccagcgttaccatttgctttcgcatttaaccgccgagcagaacgttgaagtacccgccgtctatgctggtcttgagcggaaacagcgactgcttcgtgcccaggagttgctgcaacggctggggctggaagaccgtacagagtattatccggcacagctttcgggtggtcagcaacagcgcgtcagcatcgcgcgggcattgatgaacggtggtcaggtaattcttgccgatgaaccaaccggcgcactggacagccattctggcgaagaggtgatggcgatcctgcatcagctgcgcgatcgtgggcatacggtgattatcgtcacccacgatccgcaggtcgctgctcaggccgagcgggtgatcgaaattcgcgacggcgaaattgtgcgcaatcctcccgccattgaaaaagtgaatgttactggcgggacggaacctgttgtcaacacggtgtctggctggcggcagtttgtcagcggttttaacgaggcgctgacgatggcatggcgggcgctggcagcgaataaaatgcgtactttactgaccatgctggggattattatcggtattgcgtcggtggtttccattgtcgtggtgggtgacgccgccaaacaaatggtgctggcggatattcgttctattggtacgaatactattgatgtctatcccgggaaagattttggcgatgacgatccgcaatatcagcaggcgctgaagtacgacgacttaatcgccatccaaaaacaaccgtgggtcgcctcagccacacctgccgtctcgcaaaacctgcgcctgcgttataacaatgttgatgttgctgccagtgccaatggcgtgagcggcgattattttaatgtctatggcatgaccttcagtgaaggaaacacctttaatcaggagcagctgaacggtcgtgcgcaggtcgtggttctcgacagtaatactcgccgccagcttttcccccataaagcagatgtggttggcgaggtgattctggtcggcaatatgcccgccagagtcattggtgtggcggaagaaaaacagtcgatgtttggtagcagtaaagtgctgcgtgtctggctaccttacagcacgatgtccgggcgagttatgggccagtcgtggcttaactccattactgtcagggtgaaagaaggatttgacagcgccgaggcggaacagcaactcacgcgtttactttcactgcgccacggaaagaaggatttctttacctggaacatggacggcgtcttgaaaactgttgaaaagaccacacgtactttacaactgtttctgacgctggtggcggtgatttcgctggtggtgggcggtattggtgtaatgaatattatgctggtgtcagtgaccgagcggacgcgggaaattggcattcgcatggctgtaggtgcgcgagcaagcgatgttttgcaacagttcctgatcgaagccgtactggtttgcctggtcggtggcgcgttgggaataacactgtcactgttaattgctttcaccttgcagcttttcttacccggctgggagattggtttttcaccgttggcgctgctgctggcgtttctctgctcgacggtcaccgggattttatttggctggttacccgcacgaaatgcggcacgactggatccagtagatgctctggcacgagagtaatttttgagataaaaatgccagccgatcgggctggcattttgcctttaggatgtacacaatgagacagaagagctatgcgactgccgcttctacttcgacgggcacaataacactggcgtgattgccttttggcccctggtggacatcaaactgaacggattgtccagcttttagcgttctgtaaccatccatctgaatggtggaataatgagcgaaaatatcttcgccgccgccttcagggcagatgaaaccaaaccctttggcattgttgaaccacttaacagtacccttttccatgcttcgacatccttcgcaaatcttatacaagtaagatggaataaaccggggtcagagagggggctgttcaaaacctcgccaactctagaaatacaatttagagaattagggcgagccgtcaagcatttgacaggggacaaggggcaggtatgaatcaaaaatttgaagcagttaacgctattgacaggaatgtgacagatgtcgctgatgccaacgatagatgatagttatctatcatgtggagtagattggtcaggcaaataagctcttgtcagcggcagggcgttctgccgataaccgtaaccgaagatgataactgacaatgggtaaaacgaacgactggctggactttgatcaactggcggaagaaaaagttcgcgacgcgctaaaaccgccatctatgtataaagtgatattagtcaatgatgattacactccgatggagtttgttattgacgtgttacaaaaattcttttcttatgatgtagaacgtgcaacgcaattgatgctcgctgttcactaccaggggaaggccatttgcggagtctttaccgccgaggttgcagaaaccaaagtggcgatggtgaacaagtacgcgagggagaatgagcatccattgctgtgtacgctagaaaaagcctgaatgcaggcataaaaattgggggaggtgcctatgctcaatcaagaactggaactcagtttaaatatggctttcgccagagcgcgcgagcaccgtcatgagtttatgaccgtcgagcacttgttactggcgctgctcagtaacccatctgcccgggaggcgctggaagcgtgttctgtggatttggttgcgctccgtcaggaactggaagcctttattgaacaaaccacacccgttctgcctgccagtgaagaggagcgcgacacacagccgacgctgagttttcagcgtgtactgcaacgtgcggtcttccatgtccagtcctccggtcgcaatgaggttaccggtgcaaacgttctggtcgctatctttagcgaacaggagtcgcaggcggcatatctgttgcgtaaacatgaagtcagccgtctcgatgtggtgaactttatctctcatggcacgcgtaaagacgagccgacacagtcttctgatcctggcagccagccaaacagcgaagaacaagctggtggggaggaacgtatggagaatttcacgacgaacctgaatcagcttgcgcgcgtgggcggaatcgacccactgattggtcgtgagaaggagctggagcgtgctattcaggttctctgccgtcgccgtaaaaacaacccgctgctggtgggggaatctggtgtcggtaaaaccgcgattgcggaaggtcttgcctggcgaattgttcagggcgatgtgccggaagtgatggctgactgtacgatttactctctcgatatcggttctctgttagcgggcacaaaatatcgcggcgactttgaaaaacgttttaaagcgttgctcaagcagctggagcaggacactaacagcatcctgtttattgatgagatccacaccattatcggtgcgggtgcagcgtctggtggtcaggtcgatgcggctaacctaatcaaaccgttgctctccagcggtaaaattcgtgtaattggttcgacaacctatcaggagttcagcaacattttcgagaaagaccgtgctctggcgcgtcgcttccagaaaattgatattactgaaccgtcgatcgaagaaactgttcaaatcatcaatggcctgaaaccgaagtatgaagcgcaccacgacgtgcgttataccgcaaaagcggtgcgtgcggcggtagagctggcggtgaaatacattaacgatcgtcatctgccggataaagccattgatgttatcgacgaagcgggcgctcgcgcacgcctgatgccggtaagcaaacgcaagaaaaccgttaatgtggcggatattgagtccgtggtggcccgtattgcacgcattccagagaagagtgtttctcagagtgatcgtgataccctgaaaaacctcggcgatcgcttgaaaatgctggtcttcggtcaggataaagccattgaggcgctgactgaagccattaagatggcgcgtgcaggtttaggtcacgaacataaaccggttggttcgttcctgtttgccggccctaccggggtcgggaaaacagaggtgacggtacagctttcgaaagctttgggcattgagcttctgcgctttgatatgtccgagtatatggaacgccataccgtcagccgtcttattggtgcgcctccgggatacgttggttttgatcagggcggtttgctgactgatgcggtcatcaagcatccacatgcggtgctgctgctggacgaaatcgagaaagcgcacccggacgtgttcaatattctgttgcaggtgatggataacggtacgctgaccgataacaacggacgcaaagcagacttccgtaacgtggtgctggtgatgaccaccaacgccggggtacgggaaactgagcgcaaatccattggtcttatccaccaggataacagcaccgatgcgatggaagagatcaagaagatctttacaccggaattccgtaaccgtctcgacaacattatctggtttgatcatctgtcaaccgacgtgatccatcaggtggtggataaattcatcgtcgagttgcaggttcagctggatcagaaaggtgtttctctggaagtgagccaggaagcgcgtaactggctggccgagaaaggttacgaccgggcaatgggcgctcgtccgatggcgcgtgtcatccaggacaacctgaaaaaaccgctcgccaacgaactgctgtttggttcgctggtggacggcggtcaggtcaccgtcgcgctggataaagagaaaaatgagctgacttacggattccagagtgcacaaaagcacaaggcggaagcagcgcattaatctgattgttaggtaggttggtcaagtccgtaatctcgaaagaggttacggactttttgtttatggggtggaggaggttcagaccctttttttaatgatgatggtaagttgttgataattagtgctgcgggaaggtaaggataaaaaagggtgctgcaggagaatgggatggttttgctttattaacaacgggctaaacgtgtagtatttgagttcactgccgtacaggcagcttagaaattcacaggtaacatactccacccgcccaccatgttcactgccgtacagacagataaaatgcgaaaaaaaagctcgcactttcgtacgagctcttctttaaatatggcggtgagggggggattcgaacccccgatacgttgccgtatacacactttccaggcgtgctccttcagccactcggacacctcaccaaattgttttgctaccaaacctcatgggtggcaacggggcgctactatagggagttggagtaaaacggtcaagaagaattttaatgataattattgtttgctcatactgtaaacaagttgtgcagtatatctacatcgagacaagttacggacttatacttccaaagtacttcatacatatcacaaaataaaaaggccggttaaaccgaccttttactcgttctttctcttcgcccatcaggcggtaaaacaatcagcgactacggaagacaatgcggcctttgctcaggtcgtacggggtcagttcaacagtcactttgtcgcccgtcaggatgcggatgtagtttttgcgcattttaccggagatgtgtgcagtaaccacgtgaccgttttctaactctacgcggaacatggtattaggcaacgtttcaagaacggtaccttgcatttcaatattgtcttctttggccatctaatcctctggggtatcactaccgtaatttgaaccggcaagataatgccgaagttctgtaaataagtaaagatttgcgcgctaaatcgcaacaaacaggttcggcacattactccgaaaacacacggctaagccgcaccaaaagcgcaacgtataagggagcggtgagataaacgatgggcgttacctgacgcgaaaaattccttatcggcagcggggtaatgagcgtaaccaactctgcgaccgcaattataacactctggggagaaatgtgccgaaaacattcattcttgtggtgaaaacaagcatcgtggtacccagaaattattcggcaatcgtccgaggcgcatttgattgagataattaaggtaatcccggcggggaatttcgcaggcaccaagcgatgctgtgtgatcgttaaggacctggcagtcgataagcttaccgccatgaccgataaattcctcacagaataccagaagcgccgttttagacgcattttccatccggctgaacatggactcgccacaaaatagcgttccctgggccacgccgtacataccgccgacaagctcatcttcacgccagacttcaatggagtgggcatggccgagttcgtgaaggcgatggtaggcttcgaccacgccacgcgtgatccaggttccttcttcgcgatcgctggcacagccttcaatgacctgaccaaaagcgtaattcatcgtgacacgatagggcgagcgtttatgaaatcgcttcatactacggctgatatgcagtgattctggccatagcaccgcgcggggatcgggcgaccaccagaggatggggtcgcctggagaaaaccacggaaaaataccacgctggtaagccattaacaggcgcgcagggctaagatcgcccccaagtgccagcaggccgttaggctcacgtaatgcgccttccggggaagggaaggctattgaatggcgagaaagctgaaccaggcgcatgaccgcaaaactccacgcaagtcggatcgttcaataatagcttacaaaccctgcttgaactggtaataacgcccctgtctggcaagcagttctgcgtgagtaccttgctcaataatttgcccgttgtccatcactattatttgttggaaacgagagagtccgcgaagtcgatgggtgaccattaacaccgttttctcacgcatcatttctgcaagcaattcaaggatctggctttcggttgtggcatctaagccttcggtaggttcatccagcaacaccagtggcgcatcatgtaacagcgcacgggcgatagccagacggcgcagttcaccaccggagagctggcgtccgccttcacctaaccaactgttgagacctgcatcctcgagcagcttttccaggccaacgcgacgcaagatctccgacagagcctcatcactactgccaggcgaggcgagtaaaagattatcacgcagcgtggcgctaaacagatgcactcgctgaggaacaacgctgatggtctgtcgtagagccgcttcattcaggctggctatggggctatcgttaagcaaaatctcgccctgttgcgggtcccatgcgcgggtcagcagttgtaacagtgttgatttgccgcatccggttcgcccgagaatcgctatatgttccccggcgtttacctgaagagaaatccctttaagtgcctgttgagattgctccggataagtgaactgaacatcccgtaacgtcagcgaaacgcgatcggcaacacgagtttgggtatcaggaaaggtgacctccggtttttgatccgttaagtcagagatacgtacggcagaggcaatgacttgccccagatgctgaaatgcacccgttactggtgccagtgcttcaaacgcggctaacgcgcagaagacaaacagggcaattaacgcgccgggttgagcattgccgccaacgccgccagacgccatccacagcatcaggatcaccgctaacgcgccaatgagcagcattatcgcttgcgacaatgcggtcagttcagattgacggcgttgcgcttccagccattgaatttctgtattctctagttgcgtgcgataacgatcgctggcaccaaaaatggtcagctcagcttgcccttgcagccaggccgtcagttgttggcgatactgtccgcgaagatgagtcagattttgcccggtgctttttcccgcacgataaaacagcggtggcatcaggaaaagcgtcagtaacataatgccgcccagcgtaaaggcgagggtgaaatcaaggaaacttaacccgattgtcaccaccataatcaccacaaaagcgcccaccagcggcgagataacgcgcaggtaaagatgatcgagcgtatcaacatccgccaccacgcgattgagcaattcgccctgacgatagcgcgccagtccggcaggggagaggggcagcaatttgctgaaggtgtaaatgcgcagatgctgcaacacgcggaaagtcgcgtcgtgacttaccagacgttcaaaatagcgcccggcagtacgggtgattgctgcgccacgcacgcccgcagcgggtagcatatagttgaagctgtacagtccggcaacccccgcaaccgctgaggccgagaggaaccagccggaaagtgtcaacagaccgatactggcgagcagcgtcacaattgccagcacaataccaagacttaacatccatttatgacgtttatacagtgccagatagggtagcaaagcgcgcatttaaatctcctcctgacgatgggccagtaatgtggcgaatgggccaccagccacacttaattccgcgtaacgtccttgctcaataatccggccatcctgcataacccaaatgacatcccagtcagcaagatcttctaactggtgggtgaccattaacgttgtctggcgcagagaggcggcattcagcgcctccattacgcgctgttcactgtgagcatcaaggctggcagcgggttcatccaacagtaatagcgaacagggatttagtaacgcacgggccaccgccacgcgctgcgcctgccccacggaaaggcgggcagcctggtcgccaacaggcgtatcaacgccttgtgggaggagcggtagaaactcgctgacccaggcgttatccagcgctgcttgtaattcttgttcgctggcatcaggtcgcgccagtagtacgttatcccgcaatgttgctgccggtaattgtgggttttgcccaacccaggagagatgtttacgccatgattctggtgataaatcgcgtaattctatcccgttgattcgtagcgatccctgatatgagagaaaaccagaaagcgcgttcagcagtgagcttttacctgaaccgctgcgaccaaccaacaccgcacgttggcctgctggcaaagtaaagttcagcggtccggccagcgttttaccttccggcgacgtgataaacagctcctcggcctcaatggtcaccggatcggtcgatgctaattccgcctcaccacgttgcggatgggcgagcggggtttccataaacgttttcagactgtcagctgcgccaacagcctgggctttagcatgataaaacgtaccgagatcgcgtaatggctggaaaaactctggcgcaaggatcagggccagaaaacccgcagccagcgtcacaccggtatcgtagtgaccaaaatccagctcgccgagataggaaaaaccaaagtagaccgccaccagagcaattgacagcgaggtaaaaaattcgagaatgccggaggataaaaacgccagccgtagcacttccattgtccgttggcggaaatcttccgaagcagaacgaatactttcaatttcagcttcaccacgaccaaaaatacgcaatgtttccatgccgcgcaggcgatcgaggaaatgcccacttaagcgagcaagagcgagaaagttacgtcggttagcatcggcagcccccattccaaccagcgccataaacaacggaattaacggtgcagtgcccagcagaatgagcgccgcagcccagttagaggggaagattgccaccacaatcagcaacggcaccgacactgccagcgccatttgcggcagatagcgtgcatagtaatcatgcatatcgtcaatttgctcgagtaccagcgtcgcccagctccccgcaggtttaccctgaatccacgctggccctgcttgttgcagacggtcgagaacctgacggcggatggcaaagcggatatgctgcccggcgtgataacccacccgttcgcgtaaccagaccacccatgcgcgcagtacaaaggtcagaaccagtaacgtaaagggaagcagcagggcttcacggggaatattctccataatcatatgttgcagaattcgcgccatgaaccaggcctgggcaatgatcaatatgccgctcacaaagcccagcagacgagaaatattcagccaacgttgggagatgacgctttgctgttttaaccagcgggttaactctttttgacgagatttattcattgcacgcttagcaggtgagttatcagaattatttgcagagcaatgttacaacggggaaaaaataaaggcgacccatagtcgcatggtgtcgccttctttacttttgttactgatttgtaaaattattttgcgtcagctaaaccatcgaggtagcgttccgcatcaagtgctgccatgcagcctgtaccggccgaagtaatggcctggcgataaatgtgatccatcacgtcgcctgcggcaaagacgccaggaatgctggtctgggtggcattaccatgaatacccgactgtactttgatgtagccgttttccagttccagctgcccttcgaaaatcgcagtattcgggctgtgaccgatagcaacaaacagaccggcaacgtcgagtgactcgatgttatcgctgttttgcgtatcgcgcagacgaacgccagtgacacccatttgatcgccggtcacttcttccagcgtacggttggtgtgcagaatgatgttgccgttctccactttatccatcaggcgcttaatgaggattttttccgcgcggaaaccgtcacggcggtgaatcagatgcacttccgaagcgatgttagacagatacagcgcctcttcaaccgcggtattgccgccgccgatgaccgcaactttctggttgcgatagaagaaaccgtcgcaggttgcacaagcagaaaccccacggcctttaaaggcttcttcagagggcaggccgagatagcgtgcagaagctccggtggcaataatcagcgcgtcgcaagtgtattcgccgttatcgccattcagacggaacggacggttttgcagatccaccttgttgatatgatcaaaaatgatctcagtttcaaacttggtggcatgttcgtgcatgcgctccattaataacggaccggtcagatcgtttggatcgccaggccagttttccacttccgtggtggtggtcagttggccgcctttttccatgccggtaatcagcacaggttgcaggttggcgcgcgccgcgtagacagcagcggtgtatcccgccgggcctgaacccaggataagcagtttactgtgtttggtcgtgcccatgagatccccatagttgttggcagacaatgggcaggattgtagggaatttacagacgtaaaaaaagagtatgacgattttgttaacaatttgtgcaatcggcagcatcgataagcaggtcaaattctcccgtcattatcacctctgctacttaaatttcccgctttataagccgattaaatgatgaataaacgcccctgttaatgaatatctggcatgttgtactaaaaatcgatgttttgctttgacaatcccctggtgttttgcgaaaacattcgaggaagaaaaaaaacagtattcttatatgcgcataaccatgcatgtaaataccatgtttaccgtgctagtgaaatctacgtatggcgtggacagacgccattcgtgatgtcgatagctgccacaaggcaacggtcttctcaccgtagacccaggcattgcgcgccgtgaatcttcatgatttcggtctatcgtgacgggtagcgactctgaacagtgatgtttcagggtcagacaggagtagggaaggaatacagagagacaataataatggtagatagcaagaagcgccctggcaaagatctcgaccgtatcgatcgtaacattcttaatgagttgcaaaaggatgggcgtatttctaacgtcgagctttctaaacgtgtgggactttccccaacgccgtgccttgagcgtgtgcgtcggctggaaagacaagggtttattcagggctatacggcgctgcttaacccccattatctggatgcatcacttctggtattcgttgagattactctgaatcgtggcgcaccggatgtgtttgaacaattcaataccgctgtacaaaaacttgaagaaattcaggagtgtcatttagtatccggtgatttcgactacctgttgaaaacacgcgtgccggatatgtcagcctaccgtaagttgctgggggaaaccctgctgcgtctgcctggcgtcaatgacacacggacatacgttgttatggaagaagtcaagcagagtaatcgtctggttattaagacgcgctaacacggaacaggtgcaaaatcggcgtattttgattacactcctgttaatccatacagcaacagtactggggtaacctggtactgttgtccgttttagcatcgggcaggaaaagcctgtaacctggagagcctttcttgagccaggaatacactgaagacaaagaagtcacattgacaaagttaagtagcggccgccgccttctggaggcgttgctgatccttattgtcctgtttgccgtctggttgatagctgccttactaagctttaacccttcggaccccagctggtcgcaaacggcctggcatgaacctatccataatttaggtgggatgcccggtgcgtggttggcagatacgctgttctttatttttggcgtgatggcttacaccattcccgtcattattgtcggcggttgttggtttgcctggcgtcatcagtccagcgacgaatacattgattattttgccgtttcgctacgcatcattggcgttttggcgctcatccttacctcctgtggtctggcggcaatcaacgctgacgatatctggtattttgcctccggtggcgtcattggcagcttactaagcactacgctacaaccactgctacacagtagcgggggaactattgcgctgctctgcgtttgggcagcgggcctgacgttgttcaccggttggtcatgggtgaccattgctgaaaaactcggcggctggattttaaacattctcaccttcgccagtaatcgtacccgtcgcgatgatacctgggtcgatgaagatgagtatgaagacgacgaagagtatgaagatgaaaatcacggcaaacagcatgaatcacgccgtgcccgtattcttcgcggcgcgctagcgcgtcgtaaacggttggcggaaaaattcattaatccgatggggcggcaaacagacgctgcgttgttctccggtaagcggatggatgatgacgaagagattacctacactgcacgcggtgtggctgccgacccggacgacgtcctattttcgggcaatcgtgcaacgcagccagaatatgacgaatacgatccattattaaacggtgcgccaattaccgaacctgtcgctgtagcagctgctgctaccacggcgacacaaagctgggctgcgccggttgaacctgtgactcagacgccgcctgttgcctctgttgatgttccacctgcgcaacctacagtagcctggcagcctgtaccgggtccacaaacgggagagccggttattgctcctgcaccggaaggttacccacagcagtcacaatatgcgcagcctgcagtgcaatataatgagccgctgcaacaaccagtacagccgcagcagccgtattatgcacctgcagctgaacaacctgcgcaacagccgtattatgcccctgcgccagaacaaccggtggcaggtaacgcctggcaagccgaagagcagcaatccacttttgctccacagtctacataccagactgagcaaacttatcagcagccagccgctcaggagccgttgtaccaacagccgcaacccgttgaacagcagcctgttgtggagcctgaacccgttgtagaagagacaaaacccgcgcgtccgccgctttactactttgaagaagttgaagagaagcgagcccgtgaacgtgaacaacttgcggcctggtatcaaccgattccagaaccggttaaagaaccagaaccgatcaaatcttcgctgaaagcaccttctgttgcagcagtacctccagtagaagccgctgccgctgtttccccgctggcatctggcgtgaaaaaagcgacactggcgacgggggctgccgcaaccgttgccgcgccagtcttcagtctggcaaatagcggtggaccgcgtcctcaggtcaaagaggggattggtccgcagttgccacgaccgaaacgtatccgcgtgccaactcgtcgtgaactggcgtcttacggtattaagctgccctcacagcgtgcggcggaagaaaaagcccgtgaagcccagcgcaatcagtacgattctggcgatcagtacaacgatgatgaaatcgatgcgatgcagcaggatgaactggcacgtcagttcgcccagacacagcagcaacgctatggcgaacagtatcaacatgatgtgcccgtaaacgcagaagatgcagatgctgcggcagaggctgaactggctcgtcagtttgcgcaaactcaacaacaacgttattccggcgaacaaccggctggggcgaatccgttctcgctggatgattttgaattttcgccaatgaaagcgttgctggatgatggtccacacgaaccgttgtttacgccaattgttgaacctgtacagcagccgcaacaaccggttgcaccgcagcagcaatatcagcagccgcaacaaccagttccgccgcagccgcagtatcagcagccacaacagccggttgcgccgcagccacaatatcagcagccgcaacaaccggttgcgccacagcagcaatatcagcagccgcaacaaccggttgcgccgcagcagcagtatcagcagccacaacagccagttgcgccacaaccgcaggataccctgcttcatccgctgttgatgcgtaatggcgacagccgtccgttgcataaaccgacgacgccgctgccttctctggatttgctgacaccgccgccgagcgaagtggagccggtagatacctttgcgcttgaacaaatggctcgcctggtggaagcgcgtctggctgatttccgtattaaagccgatgtcgtcaattactctccggggccggttatcactcgctttgaattgaacctggcaccgggcgtaaaagcggcgcgcatttctaacttgtcacgggaccttgcccgttcactttcgacggtggcggtgcgtgtcgttgaagttattcctggcaaaccctatgtaggtctggagttaccgaataaaaaacgacaaaccgtttatctgcgcgaagttttggataacgccaaattccgcgataatccgtcgccattaaccgtggtgctgggtaaagatatcgccggtgagccggtggttgccgatctggcgaaaatgccgcacttgttggttgcggggactaccggttccggtaaatctgtcggtgtgaacgcgatgatcctgagcatgctttataaagcacagccagaagatgtgcgtttcatcatgatcgacccgaaaatgctggagctttcggtttatgaaggcattccgcatctgttaacggaagtcgttactgatatgaaagatgccgccaacgcgctgcgctggtgtgttaacgagatggagcgtcggtataaactgatgtctgcgctgggtgtgcgtaatctggcgggttataacgaaaaaattgctgaagccgatcgcatgatgcgtccgattccagacccgtactggaagccgggtgacagtatggatgcccagcatccggtgctgaaaaaagaaccatacattgtggtgttggttgacgaatttgccgacctgatgatgacggtaggtaaaaaagtggaagagctgatagcacgtctggcgcaaaaagcccgtgccgcgggtatccacctcgtactggcaactcagcgtccatcggttgatgttattactggtctgattaaagcgaatattccgacccgtatcgcctttaccgtatccagtaagattgactcacgtaccattcttgatcaggctggcgcggaatcactgctgggtatgggggatatgctctactctgggccgaactccacgttgccggtacgtgtccatggtgcttttgttcgcgatcaggaagttcatgccgtggtgcaggactggaaagcgcgtggtcgcccacagtatgttgatggcatcacctccgacagcgaaagcgaaggtggtgcgggtggtttcgatggcgctgaagaactggatccgttgttcgatcaggcggtgcagtttgtcactgaaaaacgcaaagcgtcaatttctggcgtacagcgtcagttccgcattggttataaccgtgcagcgcgtattatcgaacagatggaagcgcaggggattgtcagcgaacaggggcacaacggtaatcgtgaagtgctggccccaccgccgtttgactaactaatgcatcgtatgccggataaggcgcggtagcgtcgcatccggcactctatcaactgaaaattcagtattttcttctttcctcaagctgattattagcctggaatagagagtagagggaactcccgatcgggagtgacgtaatttgaggaataatgatgaaaaaaattgccatcacctgtgcattactctcaagcttagtagcaagcagcgtttgggctgatgccgcaagcgatctgaaaagccgcctggataaagtcagcagcttccacgccagcttcacacaaaaagtgactgacggtagcggcgcggcggtgcaggaaggtcagggcgatctgtgggtgaaacgtccaaacttattcaactggcatatgacacaacctgatgaaagcattctggtttctgacggtaaaacactgtggttctataacccgttcgttgagcaagctacggcaacctggctgaaagatgccaccggtaatacgccgtttatgctgattgcccgcaaccagtccagcgactggcagcagtacaatatcaaacagaatggcgatgactttgtcctgacgccgaaagccagcaatggcaatctgaagcagttcaccattaacgtgggacgtgatggcacaatccatcagtttagcgcggtggagcaggacgatcagcgcagcagttatcaactgaaatcccagcaaaatggggctgtggatgcagcgaaatttaccttcaccccgccgcaaggcgtcacggtagatgatcaacgtaagtagaggcacctgagtgagcaatctgtcgctcgatttttcggataatacttttcaacctctggccgcgcgtatgcggccagaaaatttagcacagtatatcggccagcaacatttgctggctgcggggaagccgttgccgcgcgctatcgaagccgggcatttacattctatgatcctctgggggccgccgggtaccggcaaaacaactctcgctgaagtgattgcccgctatgcgaacgctgatgtggaacgtatttctgccgtcacctctggcgtgaaagagattcgcgaggcgatcgagcgcgcccggcaaaaccgcaatgcaggtcgccgcactattctttttgttgacgaagttcaccgtttcaacaaaagccagcaggatgcatttctgccacatattgaagacggcaccatcacttttattggcgcaaccactgaaaacccgtcgtttgagcttaattcggcactgctttcccgtgcccgtgtctatctgttgaaatccctgagtacagaggatattgagcaagtactaactcaggcgatggaagacaaaacccgtggctatggtggtcaggatattgttctgccagatgaaacacgacgcgccattgctgaactggtgaatggcgacgcgcgccgggcgttaaatacgctggaaatgatggcggatatggccgaagtcgatgatagcggtaagcgggtcctgaagcctgaattactgaccgaaatcgccggtgaacgtagcgcccgctttgataacaaaggcgatcgcttttacgatctgatttccgcactgcataagtcggtacgtggtagcgcacccgatgcggcgctgtactggtatgcgcgaattattaccgctggtggcgatccgttatatgtcgcgcgtcgctgtctggcgattgcgtctgaagacgtcggtaatgccgatccacgggcgatgcaggtggcaattgcggcctgggattgctttactcgcgttggcccggcggaaggtgaacgcgccattgctcaggcgattgtttacctggcctgcgcgccaaaaagcaacgctgtctacactgcgtttaaagccgcgctggccgatgctcgcgaacgcccggattatgacgtgccggttcatttgcgtaatgcgccgacgaaattaatgaaggaaatgggctacgggcaggaatatcgttacgctcatgatgaagcaaacgcttatgctgccggtgaggtttacttcccgccggaaatagcacaaacacgctattatttcccgacaaacaggggccttgaaggcaagattggcgaaaagctcgcctggctggctgaacaggatcaaaatagccccataaaacgctaccgttaatgttatcgttgcggtaatgttgttactgtatccctgtggtcgcaggctgtggccacatctcccatttaattcgataagcacaggataagcatgctcgatcccaatctgctgcgtaatgagccagacgcagtcgctgaaaaactggcacgccggggctttaagctggatgtagataagctgggcgctcttgaagagcgtcgtaaagtattgcaggtcaaaacggaaaacctgcaagcggagcgtaactcccgatcgaaatccattggccaggcgaaagcgcgcggggaagatatcgagcctttacgtctggaagtgaacaaactgggcgaagagctggatgcagcaaaagccgagctggatgctttacaggctgaaattcgcgatatcgcgctgaccatccctaacctgcctgcagatgaagtgccggtaggtaaagacgaaaatgacaacgttgaagtcagccgctggggtaccccgcgtgagtttgactttgaagttcgtgaccacgtgacgctgggtgaaatgcactctggcctcgactttgcagctgcagttaagctgactggttcccgctttgtggtaatgaaagggcagattgctcgcatgcaccgcgcactgtcgcagtttatgctggatctgcataccgaacagcatggctacagtgagaactatgttccgtacctggttaaccaggacacgctgtacggtacgggtcaactgccgaaatttgctggcgatctgttccatactcgtccgctggaagaagaagcagacaccagtaactatgcgctgatcccaacggcagaagttccgctgactaacctggtgcgcggtgaaatcatcgatgaagatgatctgccaattaagatgaccgcccacaccccatgcttccgttctgaagccggttcatatggtcgtgacacccgtggtctgatccgtatgcaccagttcgacaaagttgaaatggtgcagatcgtgcgcccagaagactcaatggcggcgctggaagagatgactggtcatgcagaaaaagtcctgcagttgctgggcctgccgtaccgtaaaatcatcctttgcactggcgacatgggctttggcgcttgcaaaacttacgacctggaagtatggatcccggcacagaacacctaccgtgagatctcttcctgctccaacgtttgggatttccaggcacgtcgtatgcaggcacgttgccgcagcaagtcggacaagaaaacccgtctggttcataccctgaacggttctggtctggctgttggtcgtacgctggttgcagtaatggaaaactatcagcaggctgatggtcgtattgaagtaccagaagttctgcgtccgtatatgaacggactggaatatattggctaatacccaatttttctgaatctaaaaagcgcctgcgggcgctttttttgtctccctttgataccgaacaataattactcctcacttacacgtaatactactttcgagtgaaaatctacctatctctttgattttcaaattattcgatgtatacaagcctatatagcgaactgctatagaaataattacacaatacggtttgttactggaatcaatcgtgagcaagcttgagtgagccattatgaaaacgaaaatccctgatgcggtattggctgctgaggtgagtcgccgtggtttggtaaaaacgacagcgatcggcggcctggcaatggccagcagcgcattaacattaccttttagtcggattgcgcacgctgtcgatagcgccattccaacaaaatcagacgaaaaggttatctggagcgcctgtacagttaactgtggtagtcgctgcccgctacgtatgcacgtcgtggacggtgaaatcaaatatgtcgaaacggacaataccggcgatgacaattacgacggcctgcaccaggttcgcgcctgcctgcgtgggcgttccatgcgtcgccgtgtctacaatccggaccgcctgaaatatccgatgaaacgagtcggggcgcgcggtgaaggcaaattcgagcgcattagctgggaagaagcctacgacatcatcgcgaccaatatgcagcgcctgatcaaagagtacggcaacgagtctatctatctgaactatggcaccggtacgctgggcggcaccatgacccgctcctggccgccgggaaataccctggtcgcgcggctgatgaactgctgcggcggctatctgaaccattacggcgactactcctccgcgcaaattgcggaaggtttgaactatacctacggcggctgggcagatggcaacagcccgtcggatatcgaaaacagtaagctggtagtgctgtttggtaataaccctggcgaaacgcgaatgagtggcggtggggtgacttactatcttgaacaggcacgccagaaatctaatgcccgcatgatcatcatcgatccgcgctataccgacaccggtgccgggcgcgaagatgagtggatccctattcgtccgggaacagatgccgcactggttaacggtctggcgtacgtcatgatcactgaaaacctggtggatcaggcattcctcgataaatattgcgttggctacgatgagaaaaccctgccagccagtgcgccgaaaaatggccactataaagcttatattctgggtgaagggccagatggcgtggctaaaacgccggaatgggcctcgcaaatcactggtgttccggcagacaaaatcatcaaattggctcgtgaaatcggtagtaccaaaccggcgtttatcagccagggatggggcccgcagcgtcacgctaacggtgaaatcgcaacccgtgctatctcgatgctggcgattctgaccggtaacgttggtattaacggaggcaacagcggcgcgcgtgaaggttcatacagcttaccgtttgtccgtatgccgaccttggaaaacccgatccagaccagcatttcgatgtttatgtggaccgatgccattgaacgtggcccggaaatgacggcgctgcgtgatggtgtacgcgggaaagataagctggatgtgccgatcaaaatgatctggaactatgccggtaactgcctgattaaccagcattctgaaatcaaccgtacccatgaaatccttcaggatgataagaagtgcgagctgattgtggttatcgactgccacatgacctcatcggcgaaatatgctgacatcctgctgcctgactgcaccgcttccgaacagatggactttgcgctggatgcatcctgcgggaatatgtcttacgtgattttcaacgatcaggtgattaaaccgcgctttgaatgtaagaccatctatgaaatgaccagcgaactggcaaaacgtcttggcgttgagcaacagtttactgaaggccgtacccaggaagagtggatgcggcatctgtatgcccagtcgcgggaagcgattcctgaactgccaacgtttgaagagttccgcaagcaggggatctttaaaaagcgcgacccacaagggcatcacgttgcttataaagccttccgtgaagatccgcaggcaaacccactgactacgccatcgggcaaaattgagatttattcgcaggcgctggctgacattgccgctacctgggaattgcctgaaggcgatgtgatcgatccactgccgatctacacgccgggctttgaaagttatcaggatccgctgaacaaacagtatccgctgcagcttacaggtttccactataaatctcgcgttcactcaacttacggcaacgttgatgtgctgaaagcggcttgccgtcaggaaatgtggatcaacccgcttgatgcccaaaaacgcggtatccacaacggcgataaagtcaggatctttaacgatcgtggtgaggttcatattgaggcgaaagtgacgccacgaatgatgccgggtgtggtcgcactgggtgaaggtgcctggtatgacccggatgcaaaacgtgtcgataagggtggttgtattaacgtactgaccactcaacgtccgtctcctctcgctaaggggaatccgtcacatacaaaccttgttcaggttgaaaaggtgtaaggagtaaccgatgacaacccagtatggattttttattgattccagccgttgcaccggttgcaaaacctgcgagctggcctgtaaagactacaaagatttgacgccagaagtcagcttccgccgcatttatgaatatgctggcggcgactggcaggaagataacggtgtctggcaccagaacgtgtttgcctactatctgtcgatttcatgtaaccactgcgaagatccggcttgtactaaagtctgcccgagcggtgcgatgcataaacgtgaagatggttttgttgtggtcgatgaagatgtgtgcattggctgccgctactgccatatggcttgcccgtatggcgcaccgcaatataacgaaacgaaaggccatatgaccaaatgcgatggttgttatgaccgtgttgcggagggtaaaaagccgatctgtgttgaatcttgtccgctgcgggcgctggatttcggccctatcgacgagctgcgtaaaaaacatggcgatctggcggccgttgcgccgttgccgcgagctcactttaccaaaccgaatattgtgatcaaacccaatgccaatagccgcccgaccggggataccactggctatctggcaaacccgaaggaggtgtgagatgggaagtggatggcatgaatggccgctgatgatcttcacggtcttcgggcaatgtgtagcaggtggttttatcgttctggctttggcgctgctcaaaggcgacctgcgagcagaagcccagcagcgtgttatcgcctgcatgtttggtttatgggtgctgatgggcattggctttatcgcctctatgctccatcttggttcaccaatgcgcgcttttaactcgctcaaccgggtaggggcttcagcactcagtaacgaaatcgccagcggttcgatcttttttgccgtaggcggcatcggctggttgctggcaatgctgaaaaagctgtcaccggcattgcgtacgctgtggctgatagtgacgatggttcttggcgtcatctttgtctggatgatggtgcgtgtgtataacagcattgataccgttccgacctggtacagcatctggacgccgatgggcttcttcctgacgatgtttatgggcggcccgttactgggttacctgttgttgagtctggctggcgtcgatggctgggcgatgcgtctgctgccagcaatttctgtactggcactggtagtgagtggcgtggtgtcagtgatgcagggcgcagagctggcgactattcatagttctgtgcagcaggccgcagcgctggtgccggactatggtgcgctgatgtcctggcggatcgtgcttttggccgttgccctgtgcttgtggattgcaccacagctaaaaggttatcagcctgcggttccgctactttctgtatcattcattctgcttctggcaggggaattaatcggtcgcggcgtattctatggtttgcatatgaccgtggggatggccgtcgcaagctaatcataacaaccggggtttcggccccggttctcttttatttctgcttcgttaacgtgtcataactggtcatcaaattacgataatcaggaatgtggttagagaacaacgtcgccagtccttcaatatcattacgccagtcgcgatgcagctcgcacgccacgccgaaccatgtcatcaattgcgcaccagcttgcgacaagcgatcccatgccgaatgccgggtaatttcattaaaggtccctgacgcgtcagtcacgacaaagacgtcaaacccttcttcaatggctgaaagcgccgggaatgccacgcaaacttcggttaccacaccggcaataattaactgttttttacctgtcgctttgacagcttttacaaaatcttcgttatcccaggcgttaatatttcccgggcgagcaatgtaaggtgtatcggggaattgtgctttcagttctggaactaatgggccgttaggaccggtttcaaaactggtggtaagaatagttggtaagttgaaatacttagccaggtcacccagcgccagcacgttatttttaaacttatcgggttcgatatcccgtacaagggaaagtaaaccagcctggtgatcaacaagcaaaacggcagcatcatttttatcaagacgaacatacggtttggtcatcctcttctcctttcgagagtcagtggtacgtctgaaatcgatcagacgcgatgcattgctctgaaagcatagacgggaaatatgagtttgctgtgaccatgaaatttttcgactgaacgaagcgtatgaaatttgtgttagttcaataaaaacaatcagatgagactaatcatctcttcagcattagcgttatgaatgagtaatataaatcgataataccgccgctgggatatcgcgtattttcacccattgacaatgtttttggcggtggcatgatgcgcatgaaatttgaacttcctcacggttttaattcatgtccacgtatacccagcctgtcatgcttttgctgtctggcctgcttttgttgactctggcgattgcggtgttaaatacactcgtgccgctttggctcgcccaggaacacatgtccacatggcaggtaggcgttgtcagctcatcctattttaccggcaaccttgtcggtacattgctgacagggtatgtcattaagcgcattggctttaaccgcagctattatctggcctccttcatttttgccgctggctgtgccggccttggcctgatgattggattctggagctggttggcttggcgttttgtcgcgggcgtcggctgtgccatgatttgggtggttgttgagagcgcgctgatgtgcagtgggacgtcacgtaaccgtgggcgtttgcttgctgcgtatatgatggtttattacgtgggaacgtttttaggccagttactggtcagcaaagtttcaaccgagctgatgtccgtattgccgtgggttacaggtttgacgttggcagggatcttaccgctgttgtttacgcgtgtgctgaatcagcaggctgaaaaccatgattcgacgtcaattacgtcaatgctaaaactccgtcaggcgcggcttggcgtgaatggctgcattatctcaggaatcgttctgggatctctatatggcctgatgccgctgtacctcaatcacaaaggggtgagcaatgccagcattggtttctggatggcggtactggtcagtgcgggtatccttggacaatggccgattggacgtctggcggataagtttggtcgactgctggtgttgcgtgttcaggtctttgtcgtcattctcggcagtatcgcgatgcttagccaggcggcgatggccccagcgttattcatcctcggtgccgctggctttacgctatatccggtggcgatggcatgggcttgcgagaaagttgaacatcatcaactggtggcgatgaaccaggccttactgttgagctatactgtgggaagtctgcttggcccgtcatttaccgctatgctaatgcagaatttctccgataatttattgtttatcatgatcgccagcgtatcgtttatctatttgctgatgctgctgcgcaacgccggtcatacgccgaaacccgttgctcacgtgtaaatgaattcaagcagagtgtgaacttactgtttcacactctgcttttttgtttcttctatctgacttgctttattccaaattttattcgtttaaaaataaaatgtgcagcaggttataattttgcatttcgctatttccgcacttcttatttgccgcgcataatccctcgttttacagatgcccctttaattttggcgaaggatttgtctatggctgggaatgttcaggaaaaacagttgcgatggtacaacattgcgctgatgtcttttatcactgtctggggttttggcaacgttgttaataactatgccaaccaggggctggtggttgttttttcatgggtgtttatctttgcactctatttcacaccttatgcgctaattgttggtcagttaggctcgaccttcaaagatgggaagggcggggtcagtacctggattaaacacacgatgggacccggactggcttatctcgccgcgtggacctactgggtggtgcatattccctatctggcacaaaaaccccaggcaattctgattgcgctcggttgggcgatgaaaggcgacggttcgctaatcaaagaatattcagtcgtagcgttacaggggttaacgctggtgctgtttatcttctttatgtgggttgcttcacgcggtatgaaatcgctgaaaatcgtcggttctgtggcagggattgctatgtttgttatgtcgctcctgtatgtggcgatggcggtaaccgcgcctgcaattactgaagtgcatattgcgaccacaaacattacctgggaaacgttcattcctcatatcgactttacctacattaccactatttcaatgctggttttcgcggttggcggagcagagaagatttctccttacgttaatcaaacgcgcaacccaggaaaagaatttccaaaagggatgttatgcctggcggtgatggttgcggtttgtgccattctgggctcgctggcgatggggatgatgtttgattcgcgtaatatcccggatgacttaatgaccaacggtcagtattacgcctttcagaagctgggcgagtattacaacatgggtaatactttaatggtgatttacgccattgcgaataccctgggacaagtagcggcgctggtattctcgattgatgccccgcttaaagtgctattaggtgatgctgacagcaaatatattccagccagtttatgtcgtaccaacgcttctggtacgcccgttaatggctattttctgaccctggtactggtggcgattctgattatgctgccgactctcggcattggtgatatgaacaatctctataaatggctgttgaaccttaattcggtagtgatgccgctgcgttatttatgggtatttgttgcatttattgcagtcgttcgcttggcgcagaaatataaaccagaatatgtctttattcgtaataagcctctggcaatgaccgtcgggatttggtgttttgcctttaccgcctttgcctgtttgacggggatcttcccgaaaatggaagccttcactgcagagtggaccttccagttggcgctgaatgttgcaacgccgtttgtgctggtaggattaggactgatattcccgctgctggcgcgtaaagcgaatagtaaataattattgtggtcggtgacgctgactctggcagatctgacccgtttttacataatcgagaaatgcgcgcaagccgcaggacatatactggcggtttggataatagatctggaagcctggacgctctgtgctccagtcttccagtacacattctaaacgaccagtatcaaggtactccttgatctgttcatagagcagatacccgataccagcacccatcaaaacggcctccagttcagcatcaacatcatccagaatgatatttcctgcgacagcaatttccagctcctttgcaaattgccagtggaaaggtttgccgctgggataacgaaaaacaacacattgatgattaagcagatcatgaggatggcggggtttgccatatcttgcaaagtactctggcgttgctgctacacataatttcactggcgggccgatcgccacgctgatcatatctttttcgacgatgcaactaagtcgaacgccagcgtcaaagccctgttggacgatatcgacaagagagtcgtcagttgtgagctcgactttaatatcaggatattcacgtgtgaaaccaaccagtaaagacattaaaaatatacgtgcagctacccgggcggcattgattttgagcgttcctgtcggtgtcagacgaaaatcattcatctcatctaacatgatctgaatttcgtcgaaagctgggcgcaatcgttcatagagattagaacccgcttccgttaacgatacgcttcgggttgtccgattgaataagcgaattttaagacgttgttccagtgttttaatactatggctaatggcggacgaggataagcctaactcatcgcccgctgcacgaaagctttgattacgggccacggcaaagaaagtggcaaagtcagacatattcatccgcattagtgaaaatccttcattaactcatcctgaatcatcacgtttacaggattatgccgcctgcgtaaagtgcgctccagaacttaacgtggaggtaaaattatgcagtctgaacgtatttatttggtatgggcccatcctcgtcatgattcattgaccgcacatattgctgatgcgatccatcagcgggcaatggaacggaaaatacaggtgacggaactcgatttatatcggcgtaatttcaacccagtgatgacgccggaagatgaaccagactggaagaatatggataaacgttattctccagaggttcatcagctttattcagagctgcttgaacatgacacgttagtggtggtttttcctctctggtggtacagcttcccggcaatgctaaaaggatatattgacagagtatggaataatgggctggcttatggagatgggcacaaattaccattcaataaagttcgttgggtggcgctggttggaggagacaaagaatcatttgtccagatgggctgggaaaaaaatataagcgattatttaaaaaatatgtgcagttatcttggtattgaagatgccgatgtcactttcttgtgtaatacagtggtattcgatggggaagaacttcacgcgagctattatcagtcgttattatctcaggtacgggatatggtagatgcactataagatgtgttaaaaacgctgtagcagaatgaagcgcggaataaaaaagcggcaactcaataaagttgccgctttacggggaaattagaacattaccttatgaccgtactgctcaagaatgcctttcacgcgttccatggtctctttcttcggtggtttaacaccgtcgagtttgtactcttcacccattgccacccatttgtgtttgcccagctcgtggtaggggagaagctcgattttctcaacgttgcccatatcacgggtaaattcaccgaggcgatgcgctgaatcgtcatcgtcagaccagcctgggacaacaacgtagcggatccacaccttcacatttttgttcgccagatatttagcgaactccagcgtgcggtggttggaaactccaaccagattttggtggatctcgtcgttcatctgtttgagatcgagcattaccaggtcggttacttccagcagttcatcaatcaccggatcgtaacgacgaacaaaaccgttggtgtccagacaggtatgaatgccttcttttttgcaggcgcggaaccagtcacgaacaaactcagcttgcaggattgcttcaccgccggatgcggtaacgccgccgccggaagcgttcataaagtggcgataggtcaccacttccttcatcaaatcttcaacggtaacttctttaccgccatgcgtgtcccaggtgtcgcggttatgacaatacaggcagcgcatcaggcagccctggaaaaaggtgataaagcgaatacctgggccgtctacggttccacaggattcaaaggagtgaatgcgaccaataactgacattgcggtgtttctccagatgtggcccatctgaggccgtgttggtgcgcagctcgaaggctacgtcgagtctgttttggcagtcaccttaaagtatagatagctgacaaaaaaggctctcgcgctaaaaaaggccccactttcgtggagcctttattgtacgctttttactgtacgatttcagtcaaatctaattacatagattgagtgaaggtacgagtaataacgtcctgctgctgttctttagtcagcgagttgaaacgtactgcgtagccagatacacggatggtcagctgcggatatttttccgggttttccatcgcgtcgagcagcatttcacggttcatcacgttaacgttcaggtgctgaccaccttcgatggatgcttcgtggtggaagtaaccatccatcagaccagccaggttggtcttacgaacttcgtcgtctttacccagtgcgttcggaacgatagagaaggtgtaggagataccatctttagcgtaagcaaacggcagtttagcaacggaagtcagagaggctactgcacctttctggtcacgaccgtgcatcgggttagcacccggtccgaacggcgcgccagcacgacgaccgtctggggtgttacccgttttcttaccatacacaacgttagaagtgatggtcagaacagactgagtcgggatagcgtcacggtaggtgtgcagtttctgaattttcttcatgaaacgttctaccaggtcaacagccaggtcatctacacgcggatcattgttaccaaactgcgggtattcgccttcgatttcgaagtcgatagccagaccgtcttcgtcacgaatcggtttaactttcgcatatttgattgcagacagggagtcagcagcaacggacagaccagcgataccacacgccatggtgcggataacgtcacggtcgtgcagcgccatcagagaggcttcgtagctgtacttgtcgtgcatgtagtggatgatgttcagtgcagtgatgtactgtttagccagccagtccatgaagtgatccatgcgctccatcacttcatcatagttcaggacatcgcctttgatcggttcagacttcggaccaacctgcattttcagtttttcgtcaacgccgccgttgattgcgtacagcatggttttcgccaggtttgcacgcgcaccgaagaactgcatttgtttaccaacgatcatcgggcttacgcagcaagcaatagcgtagtcatcgttgttgaagtccggacgcatcaggtcatcgttctcatactgcagagaagaggtgtcgatggacactttagcggcgaatttcttgaagttcagcggcagtttttcagaccacagaatggtcatgttcggttccggagacggacccatggtgtacagggtgttcaggaaacggaagctgtttttggtaaccagggtacgaccgtcgaggcccataccaccgatagattcggttgcccagatcgggtcgccagagaacagttcatcgtattccggagtacgcaggaagcgaaccatacgcagtttcatgaccaggtggtcaaccatttcctgcgcttcttgttcggtgatcttgccagctttcaggtcacgttcgatgtacacatccaggaaggtggaggtacgaccgaaggacattgcagcaccgttctgagacttaacagcagccaggtagccgaagtaagtccactggatagcttcctgagcgttggtagccggaccagagatgtcgtagccgtatttcgcagccatttctttcatctgacccagagcgcggtgctgttcagcgatttcttcgcgcagacggatagtctgttccaggtttacgccgttttccagatcagcctgcagagaagtgaactgtgccagtttgtctttcatcaggtagtcgataccgtacagcgcaacgcgacggtagtcaccgatgatacggccacggccatatgcatctggcagaccggtcagaacaccagatttacggcaacgcaggatgtccggagtgtaaacgtcgaacacgccctggttgtgagttttacggtattcagtgaagatttttttgatcatcggatccagttcgcggttgtacgctttgcaggaaccttcgatcattttgataccaccgaacgggataagagcacgtttcagcggagcttcagtctgcagaccaacgattttctcaagctgcttgttgatgtagccagcgtcgtgagaggtgatggtggaagcaacagcggtgtcaaagtcaactggcgcgtgagtgcggttttccagtttaacgccttccattactttgtcccacagggtggtggtcgcttcagtagcgccagccaggaaggactcgtcaccctcgtacggagtgtagtttttctgaatgaagtcacggacgtttacttcattctgccagtcacctttggtaaaaccttcccaggctgtggctaacttttcattaagctcggacatgtaacacctaccttcttaagtggattttttatttactgcgtacttcgacaaccattaatggtggtcgttttcacgcaggtaaatgacccagtatgtcaacccaaccaacaaaccaccaccgataatgttgccgatcgtaaccggaatcaggttatcagtgatgaaattcatcacggtcaggtgagaaaaattttccggtgcagaaccgactgcggtccaaaattccggggatgcgaagtcgcggattacaatacccatcgggatcataaacatgtttgcgatactgtgctcaaaaccgctggcaacaaacatcgcgaccggcagcaccataatgaacgctttgtccatcaggctgcggccagaataactcatccatactgccagacataccatcaggtttgccaggataccaagacagacggcctcaataaaagtatggtgcactttgtggtcggcggtttgtaggacgtttagtccccattgaccatttgcggtcatatactcgccggaaagccacattaaaagtacaaacagcagtgcgccgaccaggttgccaaaatagacatttagccagtttttcgccaactgaccccaggtgatgcgcccactcgccttagcaacaacaatcaacacggtggaagtaaagagatcggctccgcagacaacacaaagaatcagccccagagagaagcaaatgccgccaaccagttttgccatgccgaagggcattgtgcctgtgccagtggttgctgtgatatagaagacgaatgcgattgagatgaaaacaccggcggtaatcgccagatagaaagtcttaagcggatgtttcgttgctttatagacacccgcctcttcggccactttggccattgcagcaggaagtaaaagatcaaaagggttgtcagctttcacactaactctctctttattaagtcggcgacgagatactaacaaagcattatagatgagaaattgatatagatcatatctcgcctggcttataggcccgtaactcgcatggtttttatgcaaatacggagtaaatatttgattatccaaataaaaataaattttaaaaattaacaaatgagttgaattttttccgcatcctccgctaaaacagttaattaaaagggagcatcaggcgaataaagtaacaatatcgatcgtatttattaaatacaaattaccgatatttaaccttataattacaattattttattaatgcaaatatatgtaaagcggggcattaaaaaaacgccccgtaatataactcagactaatcattaagcctacattgcgtaggctatttgattttattttgcccagaatgctgctttggcgcgctgcagcttttcgtaggccttcaacaacgactgatgtgcagcaaacgcgtgcagatcgctatctaccggttgcaggccgtaaaacgccgcttcgccgctcattgccgcactggcggcttctacggcatctgcgccgtacatgcgaacaaacgcattcagatattgcagcggctggcgatcttcttcctgtgccagtaataacaacgtttgcaggcagcgataatagttggcgcgttccggactaaatactgatgagttaaactccatcgtccattcggtccagaccagagcctgttccagatcgccaccagccagcgccagcatggcttttaattcaccgatacgcagggtgtaccaaccgttatccgacccggtcgccagacccaacagctcacgcacgcgggtaaagtcatcaaaaccttcttcatccagttgctcgatgaggttcaggtaatcttctttttcccactcgctgcctggtagcgaaagaatcgtttcacgtaaatggctgcccatactgttattcgcgagccacagatcttcagccggataaatatcggacatgccaggcacgataatacggcaagcataaacgcccagatgctcgtaatcggcaatataaacttctttatcttctttgttgaagatagccatcagtgtggcgaactcttcttccgtggtgccggagaaattccagtccacaaacggataatcggcatcctgcttgaacaggtcccaggagattaaaccgctggaatcgataaagtgcgtttcgaggttggtatgttcagcgacttcttcatcatcgaaggttggcggagtaaacacatccaaatctttcaggccacgaccttgcagcagctcggtcacggtacgttccagtgctacgccaaaatcaggatgcgcaccgaaagaggcaaagcaggtaccgttagcaggattgaacagtaccacgcaaatcaccggatactggccgccaagcgaaccgtcataagcgaagattgggaaaccctccgcttccagcgtttcgatggcttcaactactgctgggtaacgcgccagcacgtctgccgggatctctggcaggctgatgctttcagcaataatgcggtttttcacgtagcgttcgaaaacttcagacaatccctgaacgcgtgcttcgttgcgggtattacctgcggacataccgttggagacgtacaggttaccaatgatattcatcggaatataaacggtctgattgtcggactgacgcgtaaacggcaggccgcaaataccacgatcttcgttaccggattgtaggtcaatcagcatgctgccggtcagttcattctccggatcataaaacgcgcgcagacggtcatcgagcagcccttctggcacatcgtcattttcggtcagtgggaaccatttttcgttgggataatgcacgaacggaccgttggcgatggtttcgcccagccagaagtccgcaaaaaagtagttggttgagagacgctcgaaatattcaccgagtgcagaagccagcgccgctttcttggttgcgcctttaccgttggtaaaacacagtgcgcactctttgtcgcgaatatgtacagaccagacgttaggcacgggattcagccaggaggcctcttcaatctgaaagccgaggtctgaaagtttttgctggaagcgagcgatggaatcttccagagcggcatctttgccggggataaatgtttgcgtcatgaaaatcactttagtcgtacggaaagcgcgcaataatacgggttttatctcaaaggcgctatcaccgccgccatgccgatgaactgttgactatgcttttagcggataaaccacgttaagagcataaaaatgaaggcgttcgatctccaccgtatggcatttgataaagtgccttttgatttccttggcgaagttgcactacgtagtctttatacctttgtactggtctttttgttcctcaaaatgaccggaagacgcggtgtgcggcagatgtcgctgtttgaagttttaatcattctgacgctgggatcagcggcgggagatgtggcgttttatgatgatgtgccgatggtcccggtacttatcgtctttattactctggcgttgttataccgcctggtaatgtggttgatggcgcacagtgaaaaactggaagatcttctggaaggcaagccagttgtcattattgaagatggcgagctggcctggtcgaaactcaataactccaacatgacggaatttgagttctttatggagctacgattgcgtggcgtggagcagctggggcaggtacgtctggcgattctcgaaaccaacgggcaaatcagtgtctatttctttgaagatgacaaggtgaaaccgggtttacttattttacccagtgattgtacgcagcgttacaaagtggtgccggagtcggcggactatgcctgtattcgttgtagtgaaatcattcatatgaaagcgggggaaaaacaattatgtccgcgctgtgcaaatccagaatggacgaaggcaagtcgggcaaaacgggtgacctgacagtaaaaacatcggctttttgctaataatccgagagattcttttgtgtgatgcaagccacatttttgccctcaacggttttactcattgcgatgtgtgtcactgaatgataaaaccgatagccacaggaataatgtattacctgtggtcgcaatcgattgaccgcgggttaatagcaacgcaacgtggtgaggggaaatggctcaaatcttcaattttagttctggtccggcaatgctaccggcagaggtgcttaaacaggctcaacaggaactgcgcgactggaacggtcttggtacgtcggtgatggaagtgagtcaccgtggcaaagagttcattcaggttgcagaggaagccgagaaggattttcgcgatcttcttaatgtcccctccaactacaaggtattattctgccatggcggtggtcgcggtcagtttgctgcggtaccgctgaatattctcggtgataaaaccaccgcagattatgttgatgccggttactgggcggcaagtgccattaaagaagcgaaaaaatactgcacgcctaatgtctttgacgccaaagtgactgttgatggtctgcgcgcggttaagccaatgcgtgaatggcaactctctgataatgctgcttatatgcattattgcccgaatgaaaccatcgatggtatcgccatcgacgaaacgccagacttcggcgcagatgtggtggtcgccgctgacttctcttcaaccattctttcccgtccgattgacgtcagccgttatggtgtaatttacgctggcgcgcagaaaaatatcggcccggctggcctgacaatcgtcatcgttcgtgaagatttgctgggcaaagcgaatatcgcgtgtccgtcgattctggattattccatcctcaacgataacggctccatgtttaacacgccgccgacatttgcctggtatctatctggtctggtctttaaatggctgaaagcgaacggcggtgtagctgaaatggataaaatcaatcagcaaaaagcagaactgctatatggggtgattgataacagcgatttctaccgcaatgacgtggcgaaagctaaccgttcgcggatgaacgtgccgttccagttggcggacagtgcgcttgacaaattgttccttgaagagtcttttgctgctggccttcatgcactgaaaggtcaccgtgtggtcggcggaatgcgcgcttctatttataacgccatgccgctggaaggcgttaaagcgctgacagacttcatggttgagttcgaacgccgtcacggttaatgccgaaattttgcttaatccccacagccagcctgtggggtttttatttctgttgtagagagttgagttcatggaatccctgacgttacaacccatcgctcgtgtcgatggcactattaatctgcccggttccaagagcgtttctaaccgcgctttattgctggcggcattagcacacggcaaaacagtattaaccaatctgctggatagcgatgacgtgcgccatatgctgaatgcattaacagcgttaggggtaagctatacgctttcagccgatcgtacgcgttgcgaaattatcggtaacggcggtccattacacgcagaaggtgccctggagttgttcctcggtaacgccggaacggcaatgcgtccgctggcggcagctctttgtctgggtagcaatgatattgtgctgaccggtgagccgcgtatgaaagaacgcccgattggtcatctggtggatgcgctgcgcctgggcggggcgaagatcacttacctggaacaagaaaattatccgccgttgcgtttacagggcggctttactggcggcaacgttgacgttgatggctccgtttccagccaattcctcaccgcactgttaatgactgcgcctcttgcgccggaagatacggtgattcgtattaaaggcgatctggtttctaaaccttatatcgacatcacactcaatctgatgaagacgtttggtgttgaaattgaaaatcagcactatcaacaatttgtcgtaaaaggcgggcagtcttatcagtctccgggtacttatttggtcgaaggcgatgcatcttcggcttcttactttctggcagcagcagcaatcaaaggcggcactgtaaaagtgaccggtattggacgtaacagtatgcagggtgatattcgctttgctgatgtgctggaaaaaatgggcgcgaccatttgctggggcgatgattatatttcctgcacgcgtggtgaactgaacgctattgatatggatatgaaccatattcctgatgcggcgatgaccattgccacggcggcgttatttgcaaaaggcaccaccacgctgcgcaatatctataactggcgtgttaaagagaccgatcgcctgtttgcgatggcaacagaactgcgtaaagtcggcgcggaagtggaagaggggcacgattacattcgtatcactcctccggaaaaactgaactttgccgagatcgcgacatacaatgatcaccggatggcgatgtgtttctcgctggtggcgttgtcagatacaccagtgacgattcttgatcccaaatgcacggccaaaacatttccggattatttcgagcagctggcgcggattagccaggcagcctgaatgaacaacgggcaataaatagccaaatctttctttatcaaaacgtcggcacattgtcggcgttttttttcggaccttgtgagtcattttgattaatggtagcgtcgcttgtcaatgtaagttgttgatacataatatttatatatgattaatcaacggatgattcacatgaagaatactaaattactgctggcgattgcgacctctgcagcattactgacagggtgtcaaaatacccacggtattgataccaatatggctatcagctccggtttaaatgcctataaagcagcaacattaagcgatgccgatgcaaaagcgattgccaatcagggctgtgccgaaatggacagcggcaatcaagtcgcaagtaaatccagcaagtacggtaaacgtctggcaaaaatcgccaaagcattgggtaacaatattaatggcactccggtcaactataaggtttatatgaccagcgacgtcaacgcatgggcgatggcgaacggctgtgttcgtgtctacagtggcctgatggacatgatgaatgacaacgaaattgaaggcgttctgggccatgaactgggccacgtcgcgttgggtcactcgctggctgaaatgaaagcttcttatgcgatcgttgccgcacgcgatgccatttcagctaccagcggtgtggcttcccagctttcccgctcacaattaggtgatatcgcagaaggcgctatcaatgctaaatactcccgtgataaagagtccgaagcagatgatttctcctttgatctgttgaagaaacgtggcatcagcacccaggggctggttggcagctttgaaaaactggctagcctggatggcggtcgcacccagtccatgtttgactctcacccaccatcaacagagcgtgcgcaacacatccgtgatcgtatcgcctctggtaagtaaatcattgtcatctttcgggctggtcttctgccagcccgctataattgcgcaataaatccccatctgaatacagacaaaactggtttttgcacacaacgttaacgatttgtggcgtcggcgcgtataatgcgcgcggttatgttaacggtacgcctgttttaaggagataaagatgacggcaattgccccggttattaccattgatggcccaagcggtgcagggaaaggcaccttgtgtaaggctatggcggaagcgttgcaatggcatctgctggactcgggtgcaatttatcgcgtactggcattggcggcattacatcaccatgttgatgttgcgtcggaagatgcgctggtaccgctggcatcccatctggatgtacgttttgtgtcgaccaatggcaatctggaagtgatcctcgaaggggaagatgtcagcggcgaaattcgtactcaggaagtggcgaatgcagcttcacaagtcgcggcattcccacgcgttcgtgaagcattattgcgtcgccaacgcgcgtttcgcgaattaccaggtctgattgccgatggccgcgacatgggaacggtggtattccctgatgcaccagtgaaaattttccttgacgcctcctcggaagaacgtgcgcatcgccgcatgctacagttgcaggagaagggctttagtgttaactttgagcgccttttggccgagatcaaagaacgcgacgaccgcgatcgtaaccgagcggtagcgccactggttccggcagccgatgctttagtgttggattccaccaccttaagcattgagcaagtgattgaaaaagcgctacaatacgcgcgccagaaattggctctcgcataagcgaccgaatttgcagtacccccgttgcaatggaatgacagcgggtatgttaaacaaccccatccggcatggagccaggtggacgttaaatataaacctgaagattaaacatgactgaatcttttgctcaactctttgaagagtccttaaaagaaatcgaaacccgcccgggttctatcgttcgtggcgttgttgttgctatcgacaaagacgtagtactggttgacgctggtctgaaatctgagtccgccatcccggctgagcagttcaaaaacgcccagggcgagctggaaatccaggtaggtgacgaagttgacgttgctctggacgcagtagaagacggcttcggtgaaactctgctgtcccgtgagaaagctaaacgtcacgaagcctggatcacgctggaaaaagcttacgaagatgctgaaactgttaccggtgttatcaacggcaaagttaagggcggcttcactgttgagctgaacggtattcgtgcgttcctgccaggttctctggtagacgttcgtccggtgcgtgacactctgcacctggaaggcaaagagcttgaatttaaagtaatcaagctggatcagaagcgcaacaacgttgttgtttctcgtcgtgccgttatcgaatccgaaaacagcgcagagcgcgatcagctgctggaaaacctgcaggaaggcatggaagttaaaggtatcgttaagaacctcactgactacggtgcattcgttgatctgggcggcgttgacggcctgctgcacatcactgacatggcctggaaacgcgttaagcatccgagcgaaatcgtcaacgtgggcgacgaaatcactgttaaagtgctgaagttcgaccgcgaacgtacccgtgtatccctgggcctgaaacagctgggcgaagatccgtgggtagctatcgctaaacgttatccggaaggtaccaaactgactggtcgcgtgaccaacctgaccgactacggctgcttcgttgaaatcgaagaaggcgttgaaggcctggtacacgtttccgaaatggattggaccaacaaaaacatccacccgtccaaagttgttaacgttggcgatgtagtggaagttatggttctggatatcgacgaagaacgtcgtcgtatctccctgggtctgaaacagtgcaaagctaacccgtggcagcagttcgcggaaacccacaacaagggcgaccgtgttgaaggtaaaatcaagtctatcactgacttcggtatcttcatcggcctggacggcggcatcgacggcctggttcacctgtctgacatctcctggaacgttgcaggcgaagaagcagttcgtgaatacaaaaaaggcgacgaaatcgctgcagttgttctgcaggttgacgcagaacgtgaacgtatctccctgggcgttaaacagctcgcagaagatccgttcaacaactgggttgctctgaacaagaaaggcgctatcgtaaccggtaaagtaactgcagttgacgctaaaggcgcaaccgtagaactggctgacggcgttgaaggttacctgcgtgcttctgaagcatcccgtgaccgcgttgaagacgctaccctggttctgagcgttggcgacgaagttgaagctaaattcaccggcgttgatcgtaaaaaccgcgcaatcagcctgtctgttcgtgcgaaagacgaagctgacgagaaagatgcaatcgcaactgttaacaaacaggaagatgcaaacttctccaacaacgcaatggctgaagctttcaaagcagctaaaggcgagtaattctctgactcttcgggatttttattccgaagtttgttgagtttacttgacagattgcaggtttcgtcctgtaatcaagcactaagggcggctacggccgcccttaatcaatgcagcaacagcagccgcttaatttgcctttaaggaaccggaggaatcatgaccaagtcagaattgatagaaagacttgccacccagcaatcgcacattcccgccaagacggttgaagatgcagtaaaagagatgctggagcatatggcctcgactcttgcgcagggcgagcgtattgaaatccgcggtttcggcagtttctctttgcactaccgcgcaccacgtaccggacgtaatccgaagactggcgataaagtagaactggaaggaaaatacgttcctcactttaaacctggtaaagaactgcgcgatcgcgccaatatttacggttaagttttttactcaaacttgaacgagagaaaagcacctgtcgggtgcttttttcatttctctaatctggaactggaagctgcctcgcagagttttgaacagttttcaccctttcgttaaattcttctgaatatgcctcggggaacgcaaaattcccaccagacaaccgctcaacaaagttgcacactttccataaacagggaggggtgcatgaaaataacgacagtcggtgtatgcataattagcggaatttttccgttgctgattttgccccaattgcctgggacattaacccttgcgtttctgactctcttcgcctgcgtactggcatttatccctgttaaaaccgtccgttatatcgcgctgacgttgctgtttttcgtttggggcatattatcagcaaagcaaattttgtgggcaggagaaaccttaactggcgcgacgcaggatgcaattgttgagatcactgcaactgacggcatgaccactcattacggtcaaattactcatctacaaggtcgacgtatattccctgcgtcaggtctcgtgatgtatggcgaatatcttccgcaagcggtttgtgctggacaacaatggtcaatgaaactcaaagttcgtgcagttcatggccaacttaatgatggcggctttgatagccagcgttatgccattgcccagcatcagccgctcaccggccgttttctgcaggcaagtgtcattgaaccgaattgtagcctgcgtgcacagtatctggcgtcactacaaacaacgctgcaaccctatccgtggaatgcggttattcttggtttaggtatgggggaacggttatccgtccccaaagaaatcaaaaatatcatgcgcgatactggaacggcgcatttaatggcgatatcgggattgcacatcgcttttgcggcgttgctggctgccggactcattcgcagtggacaaatttttctgcctgggcgctggatccactggcaaataccattaattggcggaatctgctgtgctgctttttatgcctggttgacgggaatgcaacctcctgcattgcgtaccatggtggcgcttgctacgtggggaatgcttaagttaagtgggcgacagtggagtggctgggatgtatggatatgttgtctggcggcaattttgctgatggatcctgttgccattctctcgcaaagtttatggctctctgccgctgcggtcgcggcattgatattttggtatcagtggtttccctgtcctgagtggcaactgccgccggtattgcgtgcagttgtttccctcatccatctgcaactgggaatcacacttctgcttatgcccgtgcaaatcgtcatatttcatggcattagtctgacctcgtttattgcaaatctattagcaattcccttggtgacatttatcacggttccgttgatcctcgccgcgatggttgtgcatttaagcgggccgttaatcctggagcaagggttatggtttcttgccgaccggtctttggctttacttttctgggggttaaagagtttgccggaagggtggatcaacattgctgaatgttggcaatggctatcattttccccatggttcttactggtggtatggcgattaaacgcctggcgaacgttgccagcaatgtgtgtggctggaggcttgctgatgtgctggccgctgtggcaaaaacctcgacctgacgagtggcagctgtacatgcttgatgtcgggcaagggctggcaatggtgatagccagaaacggcaaagcgattctctatgacacaggactggcctggcctgaaggggatagtgggcaacaactgattatcccctggctccactggcataatcttgaaccggaaggcgttattctgagccatgaacatctggatcaccggggagggctggattcaatattgcatatatggccgatgttatggatcagaagtccgttaaactgggaacatcatcagccctgtgtgcgtggcgaagcgtggcaatggcaaggattgcgtttcagcgcgcactggcctttacaaggtagcaacgataaaggaaataaccattcctgtgtggttaaggttgatgacgggacgaatagcattcttctaaccggtgatattgaagccccagctgaacaaaagatgctaagccgttactggcagcaagtgcaggcaacattgcttcaggtacctcaccatggcagtaatacctcatcatcgttgccattaattcagcgagtgaatggaaaagtggcactcgcatcggcatcgcgctataacgcatggcgactgccctctaacaaagttaagcatcgctatcaactgcaaggatatcaatggattgatactccacatcaaggtcaaacaacggtcaatttttcagcgcaaggctggcggattagcagcctcagggagcaaattttacctcgttggtatcatcagtggtttggcgtgccagtggataacgggtagaatatgcggctatttcaacaaatgctggttttttgaatgcataacgacaaagatctctctacgtggcagacattccgccgactgtggccaaccattgcgcctttcaaagcgggtctgatcgtggcgggcgtagcgttaatcctcaacgcagccagcgataccttcatgttatcgctccttaagccacttcttgatgatggctttggtaaaacagatcgctccgtgctggtgtggatgccgctggtggtgatcgggctgatgattttacgtggtatcaccagctatgtctccagctactgtatctcctgggtatcaggaaaggtggtaatgaccatgcgtcgccgcctgtttggtcacatgatgggaatgccagtttcattctttgacaaacagtcaacgggtacgctgttgtcacgtattacctacgattccgaacaggttgcttcttcttcttccggcgcactgattactgttgtgcgtgaaggtgcgtcgatcatcggcctgttcatcatgatgttctattacagttggcaactgtcgatcattttgattgtgctggcaccgattgtttcgattgcgattcgcgttgtatcgaagcgttttcgcaacatcagtaaaaacatgcagaacaccatggggcaggtgaccaccagcgcagaacaaatgctgaagggccacaaagaagtattgattttcggtggtcaggaagtggaaacgaaacgctttgataaagtcagcaaccgaatgcgtcttcaggggatgaaaatggtttcagcctcttccatctctgatccgatcattcagctgatcgcctctttggcgctggcgtttgttctgtatgcggcgagcttcccaagtgtcatggatagcctgactgccggtacgattaccgttgttttctcttcaatgattgcactgatgcgtccgctgaaatcgctgaccaacgttaacgcccagttccagcgcggtatggcggcttgtcagacgctgtttaccattctggacagtgagcaggagaaagatgaaggtaagcgcgtgatcgagcgtgcgactggcgacgtggaattccgcaatgtcacctttacttatccgggacgtgacgtacctgcattgcgtaacatcaacctgaaaattccggcagggaagacggttgctctggttggacgctctggttcgggtaaatcaaccatcgccagcctgatcacgcgtttttacgatattgatgaaggcgaaatcctgatggatggtcacgatctgcgcgagtataccctggcgtcgttacgtaaccaggttgctctggtgtcgcagaatgtccatctgtttaacgatacggttgctaacaacattgcttacgcacggactgaacagtacagccgtgagcaaattgaagaagcggcgcgtatggcctacgccatggacttcatcaataagatggataacggtctcgatacagtgattggtgaaaacggcgtgctgctctctggcggtcagcgtcagcgtattgctatcgctcgagccttgttgcgtgatagcccgattctgattctggacgaagctacctcggctctggataccgaatccgaacgtgcgattcaggcggcactggatgagttgcagaaaaaccgtacctctctggtgattgcccaccgcttgtctaccattgaaaaggcagacgaaatcgtggtcgtcgaggatggtgtcattgtggaacgcggtacgcataacgatttgcttgagcaccgcggcgtttacgcgcaacttcacaaaatgcagtttggccaatgatcgaaaaaatctggtctggtgaatcccctttgtggcggctattgctgccactctcctggttgtatggcctggtgagtggcgcgatccgtctttgctataaactaaaactgaagcgcgcctggcgtgcccccgtaccggttgtcgtggttggtaatctcaccgcaggcggcaacggaaaaaccccggtcgttgtctggctggtggaacagttgcaacagcgcggtattcgcgtgggggtcgtatcgcggggatatggtggtaaggctgaatcttatccgctgttattgtcggcagataccacaacagcacaggcgggtgatgaacctgtgttgatttatcaacgcactgatgcgcctgttgcggtttctcccgttcgttctgatgcggtaaaagccattctggcgcaacaccctgatgtgcagatcatcgtaaccgacgacggtttacagcattaccgtctggcgcgtgatgtggaaattgtcgttattgatggtgtgcgtcgctttggcaatggctggtggttgccggcggggccaatgcgtgagcgagcggggcgcttaaagtcggttgatgcggtaatcgtcaacggcggtgtccctcgcagcggtgaaatccccatgcatctgctgccgggtcaggcggtgaatttacgtaccggtacgcgttgtgacgttgctcagcttgaacatgtagtggcgatggcggggattgggcatccgccgcgcttttttgccacgctgaagatgtgtggcgtacaaccggaaaaatgtgtaccgctggccgatcatcagtctttgaaccatgcggatgtcagtgcgttggtaagcgccgggcaaacgctggtaatgactgaaaaagatgcggtgaaatgccgggcctttgcagaagaaaattggtggtatttgcctgtagacgcacagctttcaggtgatgaaccagcgaaactgcttacgcaactaaccttgctggcttctggcaactagttacgccgcggcagcgttcgattgatggagtcatgaatgtcgctgccgcacctctcccttgctgatgcgcgtaatcttcaccttgccgcacaaggcctgttaaacaaaccccgccgtcgagcgtcgttggaggatattccggcaacgatctcccgcatgtccttgctgcaaatcgataccatcaatattgttgcccgtagtccatatctggtgcttttcagtcgtctgggaaattatcctgcccagtggctggatgagtctctggcgcgtggcgaattaatggaatactgggcgcatgaagcctgctttatgccgcgtagcgactttcgtcttattcgccaccgcatgctggcacctgaaaaaatgggctggaaatacaaagacgcctggatgcaggaacatgaggcggaaattgcacagttaattcagcatattcatgataaggggccggtacgttcagccgattttgagcatcctcgtaaaggtgcaagcggctggtgggaatggaagccgcataaacggcatctggaaggtttatttactgccggaaaggtgatggtgattgaacggcgcaacttccagcgcgtttatgatttaacccaccgtgtcatgcctgactgggatgatgagcgcgatctcgtttcgcaaacagaagcagaaatcatcatgctggataacagtgcgcgtagcctgggaatattccgcgaacagtggctggcagattactatcggctgaaacgtccggcactggcggcgtggcgcgaagcgagggctgaacagcagcaaatcattgctgtgcatgttgaaaaattgggcaatctttggctgcatgatgatttgctgccgctactcgagcgagcgctggccggaaagctcactgcaacgcacagcgcggtactttcgccttttgatcctgttgtctgggatcgcaaacgcgcagagcagctttttgattttagctaccggctggagtgctataccccagcgccgaaacgccagtatggctattttgttctgccgttattacatcgtgggcaattagttgggcgaatggatgccaaaatgcatcgccagacaggcatccttgaagttatctctctgtggttacaggaaggtattaaaccaacgacaacgctgcaaaaagggctacgtcaggcgattactgatttcgctaactggcagcaggcaacgcgggtgacattaggatgctgcccgcaaggcctctttactgattgccgcaccggctgggaaatagaccccgtcgcataaatgattatgataagatttatgcattcataacccgatccatctggaggaactatggatcatcgtctgcttgaaatcattgcctgcccggtttgcaacggaaaactttggtataaccaggaaaaacaagagcttatttgcaaactggacaacctcgctttcccgctgcgtgatggcattccagtgttgctggaaacggaagcccgcgtgctgactgctgatgagagtaaatcatgagttttgtggtcattattcccgcgcgctacgcgtccacgcgtctgcccggtaaaccattggttgatattaacggcaaacccatgattgttcatgttcttgaacgcgcgcgtgaatcaggtgccgagcgcatcatcgtggcaaccgatcatgaggatgttgcccgcgccgttgaagccgctggcggtgaagtatgtatgacgcgcgccgatcatcagtcaggaacagaacgtctggcggaagttgtcgaaaaatgcgcattcagcgacgacacggtgatcgttaatgtgcagggtgatgaaccgatgatccctgcgacaatcattcgtcaggttgctgataacctcgctcagcgtcaggtgggtatggcgactctggcggtgccaatccacaatgcggaagaagcgtttaacccgaatgcggtgaaagtggttctcgacgctgaagggtatgcactgtacttctctcgcgccaccattccttgggatcgtgatcgttttgcagaaggccttgaaaccgttggcgataacttcctgcgtcatcttggtatttatggctaccgtgcaggctttatccgtcgttacgtcaactggcagccaagtccgttagaacacatcgaaatgttagagcagcttcgtgttctgtggtacggcgaaaaaatccatgttgctgttgctcaggaagttcctggcacaggtgtggatacccctgaagatcttgagcgcgttcgcgctgaaatgcgctaatttcacttcacgacacttcagccaattttgggaggagtgtcgtaccgttacgattttcctcaatttttcttttcaacaattgatctcattcaggtgacatcttttatattggcgctcattatgaaagcagtagcttttatgagggtaatctgaatggaacagctgcgtgccgaattaagccatttactgggcgaaaaactcagtcgtattgagtgcgtcaatgaaaaagcggatacggcgttgtgggctttgtatgacagccagggaaacccaatgccgttaatggcaagaagctttagtacgcccggaaaagcccgacaactggcatggaaaaccaccatgctggcaagaagtgggactgtccgtatgccgactatttatggtgtgatgacgcatgaagaacaccccggccccgatgtcctgctactggagcggatgcgtggtgtttcggtggaggcaccagcccgaacaccagaacgctgggaacaactcaaagaccaaatcgttgaagccttactggcctggcaccgtcaggacagtcgcggttgcgtcggcgcggtcgacaatactcaggaaaatttctggccctcatggtaccggcaacatgttgaagtgctatggaccacgctcaatcagttcaataacaccggtctgacgatgcaggataagcggatcctgtttcgcactcgcgaatgtctcccggcattatttgaaggctttaacgacaattgtgtgctgattcacggtaacttctgtttacgcagcatgttgaaagattcgcgcagcgatcagttactggcgatggtcgggccgggactaatgctttgggcaccgcgagaatacgaactgttccgactaatggataattctctggcggaagatttgctctggagttacctgcaacgcgcgccagtggcggagtcgttcatctggcggcgttggttgtatgtgttatgggatgaagttgcgcaactggttaataccggacgatttagtcggcgcaacttcgatctggcatcaaaatcactcttgccgtggctcgcctgacgaaccttttagccactgccagatacggccaagcgtttcatagccaacacgatcgctatgcatcaaccagaccggagaagggattgcccgttcccacgggttaagcggcgagtcgatggccaactgattcgccggggctggtagcggatttaacccttcctgctgaaaaaagatcatcgcccgcggcagatgtgatgcggaggtcaccagcaggaaaggggcgtcaccaatcgcctgtttcactgctgcagcttcttcttcggtatcttttggcaaatccagggtgataatttgctcgcgcggcacgcccagcgattgcgcaactctggcacctacttccgctgtactcaccgtattggtttttgctacgcctcccgtgaagatcagttttgatcccggattttcgcgccataagcgaataccttcattcaggcgtggcagactgttattgattaaattagagctcggtgcccactgcgggttccaggtataaccacctccgagcaccacgatatagtccactttttgcgaattattccatgtcggataggtgctttcgatgggacgcagcaggcggtcggctaccggttgcaaactcaataacaagagcgccagccacccaatgctaataaaaatcttcccggttttttgaaaacggctaaaccacagcagcgccaggccagcgccaataatcaacaacatcagcggaagtggcagcaacatattgccaatcacttttttcagtgtaaaaagcatcctttctggttccttttttaaccatatagcaagggatcgccagcgatattacaccagacgggttcattctcgccgtggctgtgacaaaatagcgtctttatcagaaaacgtcttagccaaccggtggagaaagcaatgcaggatcgcaattttgatgatattgcggaaaagttttcccgtaacatttacggcaccaccaaagggcagcttcgacaggctattctgtggcaggatctcgatcgcgtgctggcggaaatgggcccgcaaaaactgcgtgtgctggatgctggcggtggagaagggcagaccgcaatcaaaatggccgagcgtgggcatcaggtcattttatgcgatctttctgcgcagatgatcgaccgcgcaaaacaggcggcagaagcaaaaggtgtgagcgacaacatgcaatttatacattgcgccgctcaggatgttgcttcgcatttggaaacgcccgttgatctgatattgttccatgcggtgctcgagtgggtggctgatccccgcagcgtattgcagaccctgtggtcagtgttgcgtccaggcggcgtgttgtcgttaatgttctacaatgcgcatggtttgttgatgcataacatggtcgccgggaattttgattacgtgcaggcgggaatgccgaaaaagaaaaaacggacgctttcgccagattacccacgcgacccggcgcaggtttatctgtggctggaagaagctggttggcaaattatgggtaagacaggcgttcgcgtgtttcatgattatctgcgcgagaaacaccagcagcgcgactgctatgaagcattacttgaattagaaacgcgttattgccgtcaggaaccgtatattaccctggggcgttatattcatgtcaccgcgcgcaaaccgcagagcaaggataaagtatgagtgaattttcccagacagtccccgaactggttgcctgggccagaaaaaatgacttctccatctcgctgccggtagaccgactctcttttctgctggcggttgccacgctgaacggcgagcgtctggatggtgagatgagtgaaggcgagctggtggatgcattccgccatgtgagtgatgcgtttgagcaaaccagcgaaaccatcggcgtgcgcgccaataacgcgatcaacgacatggtgcgtcaacgtctgctgaaccgctttaccagcgagcaggcggaagggaacgcaatttaccgtctgacgccgctcggcatcggcattactgactactacatccgtcagcgcgagttttctacgctgcgtctttctatgcagttgtcgattgtggcgggtgagctcaaacgcgcagcagatgccgccgaagagggcggtgatgaatttcactggcaccgtaatgtctatgcgccactgaaatattcggtagcagaaattttcgacagtatcgacctgacgcaacgtctgatggacgaacagcagcagcaggtgaaggacgatatcgcccagttgctgaacaaagactggcgggcggcgatttccagctgtgaattgttgctttcggaaacttccggaacgctgcgtgaattgcaggatacgctggaagcggcaggcgacaaattgcaggctaatctgttgcgcattcaggatgcgacgatgacccatgacgatctgcatttcgtcgatcgtctggtgttcgatctgcagagcaaactcgatcgtattatcagttggggccagcaatccatcgacttgtggattggctacgaccgccacgtacacaaatttattcgtaccgcgatcgatatggataaaaaccgcgtctttgctcagcggttacgtcagtcggtacaaacctattttgatgagccgtgggcgctaacttatgccaatgccgatcgtctgctggatatgcgtgacgaagagatggcactgcgcgatgaagaagtgactggggaacttcctgaggatctggaatacgaagagtttaacgagatccgcgaacagctggcggcgatcatcgaagaacaacttgccgtgtacaaaaccagacaagtgccgctggatcttggtctggtggtacgcgaatatctgtcacagtatccgcgtgcacgtcactttgacgttgcgcgtattgttattgatcaggcggtacgtcttggcgtagcgcaagcagatttcaccggactgccagcgaaatggcagccgattaatgattacggagccaaggtacaggcgcatgtcatcgacaaatattgaacaagtgatgccggttaagctggcgcaggcgctggcgaatccgttatttccggcgctggacagcgccttacgttcaggacgccatattggcctcgacgaactggataatcatgcattcctgatggattttcaggaatatctggaagagttttacgcgcgttataacgttgagcttattcgcgcaccagaagggttcttctatttacgcccacgttccaccacgctgatccctcgttccgtcttgtcggaactggatatgatggtcgggaaaatcctctgttatctctatctcagcccggaacggctggcgaatgaggggattttcacccagcaggaactgtacgacgaactgctcaccctggccgatgaagcaaaactgctgaaactggtgaacaaccgttcaaccggttcagacgttgaccgtcagaagttgcaggagaaagtacgttcttcgctcaaccgtctgcgtcgtttaggcatggtgtggtttatgggccacgacagcagcaagtttcgcattaccgaatcggtgttccgcttcggagccgatgtgcgtgctggcgacgatccccgtgaagcacagcgtcgcctgattcgtgatggcgaagcaatgccgattgaaaatcatctgcaactcaacgatgaaaccgaagagaatcagccagatagcggagaggaagaataatgattgaacgcggtaaatttcgctcactgacgctgattaactggaacggcttttttgcccgaacttttgaccttgacgagctggtcacgacgctttctggcggtaacggggcgggtaaatccaccaccatggcggcgttcgttacggcgctgatccccgacctgaccctgctgcatttccgtaacactacggaagccggggccaccagcggttcgcgcgataaaggtctgcacggtaagctgaaagcgggtgtctgttattcgatgctcgacaccattaactcgcgccaccagcgcgtggtggtcggtgtgcgtctgcaacaggttgccggacgcgatcgtaaagtggatatcaagccgtttgccattcagggactgccgatgtcggtgcagccgacacagctggtgaccgaaaccctgaacgaacgccaggcgcgcgtgctgccgcttaacgagctgaaagacaagctcgaggcgatggaaggcgtgcagtttaaacagttcaactccattactgattaccactcgctgatgttcgatctgggcatcatcgcgcgtcgtctgcgctccgcatctgaccgtagcaaattctatcgtctgatcgaagcttcgctgtatggcgggatctccagtgccattacccgttctctgcgcgactacctgttgccagaaaacagcggcgtgcgtaaagcgttccaggacatggaagcggcgctgcgtgaaaaccgtatgacgctggaagcgattcgtgtcacccagtcggaccgcgacctgtttaagcatctgatcagcgaagccaccaactacgtggcggcggactacatgcgtcacgccaacgagcgccgtgtccatctcgacaaagccctggagtttcgtcgcgagctacatacttcgcgtcagcaactggcggctgagcagtacaaacacgtcgatatggcgcgtgagctggcagagcacaacggtgccgaaggcgatctggaagcggattatcaggcggccagtgatcacctgaacctggtgcaaaccgcactgcgtcagcaggagaagatcgaacgctacgaagcggatctcgatgagctgcagatccgtctggaagagcaaaatgaagtggtggcagaagccatcgaacgccaggaagagaatgaggctcgtgcggaagctgccgaactggaagtggacgagctgaaaagccagcttgctgactaccagcaggcgctggacgtccagcaaacgcgcgcgatccagtataaccaggcgattgctgcgcttaatcgtgccaaagaactgtgccatctgccggacttaaccgccgactgcgccgccgaatggctggaaaccttccaggcgaaagagctggaagcgactgaaaaaatgctctctcttgagcagaaaatgagcatggcgcaaaccgcgcacagccagtttgagcaggcttatcagctggtggtggcaatcaacggcccactggcgcgtaacgaggcgtgggatgtcgctcgcgaactattgcgcgaaggggtcgatcagcgtcacctggcagagcaggttcagccgctgcggatgcgattaagcgaactggaacagcgtctacgcgagcagcaagaagctgagcgtctgctggcagatttctgcaaacgtcagggcaagaattttgatatcgacgaactggaagccctgcatcaggaactggaagcacgcattgcctctctttccgatagcgtgtctaacgcccgtgaagagcgcatggcactgcgccaggagcaggaacagctgcagtctcgcattcagagtttgatgcagcgtgcgccggtttggctggcagcgcaaaacagtctcaaccagttgagcgaacagtgcggcgaagagtttacctccagccaggacgtcaccgaatatctgcaacagttgctggagcgtgagcgagaggcgattgttgaacgcgatgaagtgggcgcgcgcaaaaacgccgtcgatgaagagatcgaacgtttaagccagcctggcggctctgaagatcagcgtctgaacgcgctggcggagcgttttggtggtgtgctgctgtcagaaatttatgacgacgttagcctggaagatgcgccgtacttctcagcgctgtatggcccgtcacgccacgccatcgtggtgccagatctgtcacaggtaactgaacacctggaaggcttgaccgattgcccggaagatctctatctgatcgaaggagatccgcagtcattcgatgacagcgtgttcagcgttgatgagctggaaaaagcggtagtggtgaaaatcgccgatcgtcagtggcgttattcacgtttcccggaagtgccgctgtttggtcgtgctgcgcgtgaaagccgtattgaaagcctccatgccgagcgtgaagtgctttccgaacgcttcgccacgctctcctttgatgtacagaaaactcagcgtctgcatcaggcgttcagccgctttatcggcagtcatctggcggttgcgtttgagtctgacccggaagcagaaatccgtcaactgaacagccgtcgcgtcgaactggagcgggcgttaagtaatcatgaaaatgataaccagcagcagcgtattcagtttgagcaggcgaaagagggcgttacggcgctgaaccgcattctgccgcgtctcaacctgttggctgatgacagcctggcggatcgcgtcgatgaaatccgcgaacgtctggatgaagcccaggaagccgcgcgttttgttcagcagtttggcaatcaactggcgaaactggaaccgattgtttcggtattgcagagcgacccggaacagttcgaacagttaaaagaagattacgcgtactctcagcagatgcagcgcgatgcccgtcagcaggcgtttgccctgacggaagtggtgcagcgtcgtgcgcactttagctattctgactcggcagaaatgcttagcggtaacagcgatctcaacgaaaaactgcgtgaacgtctggaacaggcggaagcggagcgtacccgcgctcgcgaagcgttgcgcggtcacgcagcgcagttgagtcagtacaaccaggtgctggcttcgctgaaaagttcttacgacaccaaaaaagagctactcaacgatctgcaacgtgaattgcaggatatcggcgtgcgtgctgatagcggggcagaagagcgggcgcgtattcgccgtgacgagctgcatgcgcaactgagcaataaccgttcacgccgcaatcaactggaaaaagcgcttaccttctgcgaagcggagatggacaacctgacccgcaaactgcgcaagctggagcgggattactttgagatgcgcgagcaggtagtgaccgccaaagcgggctggtgtgcggtgatgcgcatggtgaaagataacggcgttgagcgccgcttacaccgtcgtgagctggcttatctctccgctgatgatttgcgttccatgtcggataaggcgttaggtgcgctgcgtctggcggtggcggataacgaacatctgcgcgacgtgctgcgcatgtcggaagatccgaaacgtccggagcgtaaaattcagttcttcgtggcggtttatcagcatctgcgtgaacgtattcgtcaggatattattcgtaccgatgatccggtggaagctatcgaacagatggagattgaacttagccgtctgaccgaagaattaacctcccgtgaacagaaactggcgatcagttcccgcagcgtggcgaacatcattcgcaaaaccattcagcgcgagcagaaccgtatccgtatgctcaaccaggggttgcagaacgtatcgtttggtcaggtgaacagcgtgcgtctcaacgtgaacgtgcgtgaaacgcacgccatgctactggatgtgctctctgaacagcacgagcagcatcaggatctgtttaacagcaaccgtttgaccttctcggaagcgctggcgaaactgtatcaacgtcttaacccgcagattgatatggggcagcgcacgccgcagaccatcggtgaagaactgctggattaccgcaactatctggaaatggaagttgaggttaaccgtggttccgatggctggctgcgcgcagagtctggtgcattgtcgaccggtgaggcgattggtaccggtatgtcgattctggtgatggtggtacaaagctgggaagatgaatctcgccgcctgcgcggtaaagatatctctccttgccgcctgctgttcctcgatgaagcagcgcgactggatgctcgttctatcgccacgctgtttgaattgtgtgagcgtttgcaaatgcaactcatcatcgcagcgccggaaaatatcagcccggagaaaggcaccacctataaactggtgcgtaaagtcttccagaataccgaacacgttcatgtcgtcggcctgcgaggatttgcgccgcaactccctgaaacgcttccaggaactgacgaagcgccttctcaggcgagttaaaattaaggcggcagcaatgccgccttttctttttccgaaaactccgtttctgcactaaaaaagtggcacattacggcgcgcttttctttaaacttctttacattaggttatgtaaaaacgtatcggcgtttatatactgaagataagcctgatgagtaacaggcttgctcgtcatactttcgtgagtattggcgttgtacaggcaagtcgtaaaataacagcctggctattcagagtatgataaaaacagggggcaagggatgttgcttaatatgatgtgtggtcgtcggctgtcggcaatcagtttgtgcctggccgtaacattcgctccactgttcaatgcgcaggccgatgagcctgaagtaatccctggcgacagcccggtggctgtcagtgaacagggcgaggcactgccgcaggcgcaagccacggcaataatggcggggatccagccattgcctgaaggtgcggcagaaaaagcccgcacgcaaatcgaatctcaattacccgcaggttacaagccggtttatcttaaccagcttcaactgttgtatgccgcacgcgatatgcaacccatgtgggaaaaccgtgatgctgttaaagccttccagcaacagctggcagaggtggcgattgccggtttccagccgcagtttaataaatgggtagagttactgaccgatcctggtgttaacgggatggcacgcgacgtggtgctctctgatgcgatgatgggctatctccatttcattgcaaatattccggtcaaaggcactcgctggctatatagcagtaaaccttatgcacttgcaacgccgccgctctcggtgattaaccaatggcagctggcgctggataaaggtcaattgcctacgtttgttgcaggactggcaccgcagcatccgcaatatgcggcgatgcatgaatcgttactggccttactctgtgacaccaaaccgtggccccaactgaccggcaaagcaacgttgcgcccagggcagtggagtaacgacgtaccggcgttgcgcgaaatattgcaacgcacaggcatgttggacggggggccgaaaattactctacctggcgatgacacgccaactgacgcggtagtcagcccatccgctgttactgttgaaacagcagaaactaagccgatggataagcaaacgacgtctcgtagtaaacctgcgcctgccgttcgcgccgcctacgataatgaactggtggaagccgttaaacgttttcaggcatggcaaggattgggggcagatggtgctattggcccggcaacacgtgactggttaaacgtaacgcccgcccagcgtgctggcgtgttggctctcaacatccagcgattgcgcttgctgccaacagagctttctaccgggatcatggttaacattccggcctattcgctggtctactatcagaacggcaatcaggtgctggattcgcgagtcattgtcggtcgccccgatcgcaaaacgccgatgatgagcagtgcccttaacaacgtagtggtaaacccgccgtggaacgtacctccaactctggcacgcaaagatattctgccaaaagtgcgcaacgatccgggatatctcgaaagccatggctatacggtgatgcgcggctggaacagcagagaagcgattgacccatggcaggttgactggtctacaatcacggcctcgaatttaccgttccgcttccagcaggctccaggcccacggaactcgctggggcgctataaattcaatatgccgagttcagaggccatttatttgcatgacacgccgaaccacaatctgttcaagcgtgatacacgcgcattgagctcaggctgtgtacgagtgaataaagcttccgatctggcgaatatgctgttgcaggatgcaggctggaatgacaaacgtatttctgatgcgctgaagcagggtgatacacgttacgtcaatattcggcagtcgattccggtgaatctctactacctgacggcctttgttggtgcagatggtcgtacccagtatcgtacagatatttacaattatgatctgcctgcgcgatccagctcgcaaatcgtatcgaaagcggaacaattaatcaggtaaatgaagtagttcggggaaatcagttgtcgtaataattagcatgattgggggcgattctctgcagcccccgtcactgctggggttgagtcatcttgacgtctgctttacgggcggttaaggtgcctcttgtgcgccagaagtgcatataaacgataacattgacctgtagacttgattatcatggacaaattcgacgctaatcgccgcaaattgctggcgcttggtggcgttgcactcggtgccgccatcctgccgccccctgcgtttgcaacactctctaccccacgcccgcgcattttgacactcaataatcttcataccggagagtcaatcaaagcggagtttttcgatggcagaggctatattcaggaagaattggcaaaacttaaccattttttccgcgattaccgcgcgaacaaaataaagtccatcgacccaggattattcgaccagttgtatcgcctgcaagggttgttaggcacgcgcaaaccggtgcaactcatttccggttatcgttctattgataccaacaatgaactacgcgcccgcagccgtggagtagcgaagaaaagctatcacactaaaggccaggcgatggatttccatattgaaggtatcgcgttaagcaatattcgcaaagccgcgttatctatgcgcgcaggtggtgtaggatattatccacgtagtaactttgtgcatattgataccgggccagcacggcactggtagtaattgcttaacgaaacaggggcagtatgaactatcgtattattccggtcaccgcattctcccagaactgttcattaatctggtgtgaacaaacccgtctggccgcactggtcgatcctggcggcgatgcggaaaaaatcaaacaggaagttgatgacagcggcctgacactgatgcagatcctgctgacgcatggtcatctggaccacgttggcgcagcggcggaactggcgcaacattacggcgtgccggttttcggcccggaaaaagaagatgagttctggctgcaaggcttgcctgcgcaaagtcgtatgtttggtctggaagagtgccagccgctgacgccagatcgttggctgaacgaaggcgataccatcagcatagggaatgtgactttacaggtgttacattgccctgggcatacgccgggtcatgtcgtgttttttgatgatcgggcaaagctgctgatttctggcgatgttattttcaaaggcggagtagggcgcagtgacttcccgcgtggcgatcataatcaactgatttcttcaatcaaagataaattgctgccactgggggatgacgtgatatttattccgggtcacggaccattatccacacttggttatgaacgcctgcataatcccttcctgcaagacgaaatgcccgtctggtaaggcacataaaaaagcccgcttttaatgcgggcctggatttctggcaaagtgcgctttgtttatgccggatgcggcacgagcgccttatccggcctacaaaatcgtgcaaattcaaaatattgcaggggacgcgtaggcctgataagcgtagcgcatcaggcaatgttgcgtttgtcatcagtctcagcccgcttttcagcgggcttcattgtttttaatgcttacagcactgccacaatcgcttcgcacagcggagccatgttatctggtgtcatcccggccacatttacgcgaccagaagcaaccgcatatacgccaaactcttcgcgcagacgcagcacttgttcttttgtcaggccactgaaggagaacatgccgttctgtttgatgataaagctgaagtcgcggtttgcgcctttttcctgcagcgtattgacgaacaactgacgcatacgctgaatacgctggcgcatatcagtcagctcttgttcccaaatcgcacgtaacgcatcgttgctcaggatggtggcaacaacagaagcgccgtgtgctggtgggttagagtagttagcgcgaatcgccgctttcatttggctgaatgcgcgatcaacggtttcactgtcggcagcaaccagagtacaagcgccaacacgctcgttgtacaggccaaagtttttagagtaggaactggcaacaatcagctctttatgcatagccgcgaaagcgcgcagtccttcagcatcttcttccagaccacgggcaaaaccctggtaagcgaagtcaaacagcggtaaccagcctttctcaacggagagttgtgccagtgtttgccattgttccagcgtagggtcgataccggttgggttatggcagcagccatggaacagcactacgtcgccagcctgagcttcattcaggctgttaatcagtgcatcgaagtcaagagtgtgattttccgcatcataataagcgtattcacgaacttccagacctgcagagttaaagacgctcttatggttcggccagcttgggttgctcacccacacacgcttaacgctggtattttttgccaggaaatcggcagccacgcgtagtgcgccagtgccccccggagtctgtgccgtgcgagcacgtttgtcattgatcagggcgctacctttaccaaacagcagttcctgagtgcagcgaccaaattcagggatgccgtcaatgccgaggtaatttttggtggtttcattttcgagcagatactgttcagcctttttcacgctggtcagtaccggggttttgcccgtctcatctttatagacaccaatcccgaggttaattttgccgggacgttcatcggcacgaaacagatcggccaggcccagaatcgggtcggcaggagcggcggtaatgttctcaaacatgacgaggttccattatggttacagaagggaagtccgctatcagggtaacgggagatttacaaaattccaactattactgatgaaaacgcaggctgtttttgcaagacgtgagattgctctggaaggtataaaaaaaacaggaccaaagtcctgttttttcggcatttaacaaagaggtgtgctattagaactggtaaacgatacccacagcaacggtgtcgtctgaacctacgcccagtttgttgtcagaatcgatctggttgatgatgtagtcaacataggtggacatgtttttgttgaagtagtaggttgcgcccacttcaaagtagttcaccagatcaacatcaccgataccttctacgtctttcgctttagatttggtgtaagcgatggacggacgcagaccgaaatcgaactggtattgcgcaactaacagaacgtcttgcgttttgttggcgaagccgctggtgtttgtaaatttattagtgatcggcgtagcgttacgggtttcaccgtagttcgctgccaggtagatgttgttcgcgtcgtacttcagaccagtagcccactgttcagcttttttaccgttgccaagaggttgagcttcttgcaggttggtacggtcagctgcaccataagcaccaacgataccaaagccttcgtattcgtagctgatagaaccgccaacaccgtcgccgttagaacggcgtgcagtgtcacgctcgtttttacccaggtactgaacagcgaagttcaggccatcaaccagaccaaagaagttggagttacgataggtagcaacgccgccaacacgaccaacgaagaagtcatcgctgtatgcagtatcaccaccaaattctggcagcatatcggtgtaacccagtgcatcataaaccacaccgtagttacggccgtaatcgaaagaaccaacgtcagcgtatttaagacccgcgaatgccagacgcgttttgttaccagtttgagcgtcagcgccttcagagttgttaccctggaagttatattcccactgaccataaccggtcagatcggaattgatttgagtttcccctttaaaaccaagacgggcataggtcatgtcgccattgccaccgtaactgttttcaccgttacccttggaaaaataatgcagaccaacagctttaccgtacagatctactttgttgccatctttgttatagatttctgcagcgtttgcagtacctgctactaacagagcagggacgatcactgccagaatattgcgcttcatcattatttattaccctcatggttttttttatgacacctgccactgccgtcaataagttctgtcaataaaaatttacggaactattgatgagagtttggtgtctttatgtgtctgcaggcatctttccattcaaactaacgtttcgctaccgtgaaagtgctacaaagataaagatttggtttcaaaaagaaaaaatatgtaaccaaaagtaaaatttaaggaactttgtgaacaccgtcatatttccatagagacgtgatgatatttacagcaattttaatctatttatatgatttccttatatttaaattaactaaacggaaattttgtttctgatggaaactttatcgacctggcacaaaatcttctttcagacatccagaatgccaaaaaatagtatgaaaattgtgctattagctaagaaaaaactaatccgcaataagaatgcggattagtttttgcgcgtaaatgttgcaatgtaatattccgtaacaggatgatcgttatggcggggttgcaaatagattgcttgacttaacaaacaaataacttgacagaaaagataaaaaaagagccagcgggcgctggctcttgaagacgctaaattagaagctggcgttacgcggagtacgtgggaacggaatcacatcacgtacgttttgcacgccagttacgtaagcaatcagacgttcaaaaccaagaccgaaacctgaatgcggaacagtaccgtagcgacgcagatcgcgataccaccagtaatcttctttattcaggcccatttccagcatacgctcgtccagcacgtccagacgttcttcacgctgggagccaccaatgatctcaccgatgcccggagccagaacgtccatagccgcaacggttttaccgtcttcgttaaggcgcatatagaacgctttaatatctttcggatagtttttaaccactaccggtgctttaaagtgttcttccgccagataacgctcatgctcagaagagagatcgactccccagtaaaccgggttttcaaacttcctgccgcagttttcgagaatggtcactgcgtcggtataatccacctgcgcaaaatcggcttcaatgaagcgttccagacgtgaaacggcatctttatctacgcgttcagcgaagaatttcatgtcgtcagcgcgttcttcgagaaccgctttgaagacatatttcagcatggcttcagccagacccgcaatatcgttcaggttagcaaacgccacttccggctccagcatccagaattccgccaggtgacggctggtgttggagttttcagcacggaaagtcgggccgaaggtataaattttggacaatgcgcaagcgtaggtttcgccgttcaactggccagatacggtcaggaaagactctttaccaaagaagtctttgtcgaaatccactttgccctgatcgttacgcggcaggttttccagatccagcgtagaaacgcggaacatttcgcctgcaccttcggtatcagatgcggtaatcagtggcgttgaaacccagaagaatccctgctcgttaaagaagcgatgcagcgcctgcgccagcgtatggcgaacgcgcgcgacggcaccaatcaggtttgtgcgcggacgcaggtgagcgacttcacgcagatactcaatgctgtggcgttttgccgccatcgggtaagtgtctggatcttcaacccaaccagcaacttcaaccttgctggcctgaatttcaaattgttgcccctggcccggcgacgccacgactttacccgtcacaatgaccgagcagccggtggtcagacgcaggacgtcttcattgtaattgggcagagaattattgatgacagcctgtacaggatcaaagcaggaaccgtcataaacggcgaggaaggagatgccagcttttgaatctcggcgggtacgtacccatccgcgcacggtgacttcgctgtcaacggctacacggccctggagtacgtcggctacaggcacaacgctcataatattctctctgttaatagtcggaaaaaataaacacttgtccacccgtaaatggggggatacctatgttacctggcatctgcaatcagacaagcagaattcgcaaatgcagcgaaagatttcggaattaaaggtaaaaaaagggagccgattagctccctgatgatattaactggcttttttaatatgcggaaggtcgaacgctttgcgcagcgcccgaacaaacgctttatcatggcagatagttttgccagggctgtcagaaagtttcgccaccggtttaccgttacactctaccaacttaatgacaatattcaggggttttacctgggggatatcgcaggtcaggcgagtcccaataccaaaacttaattgcacgcgggaagagaagtggcggtatagctcaaccgctttgcgtaaatccagattgtcagagaaaaccagcgttttactctgtggatcaattcccagcttttcataatgtgcaatggctttttcaccccattcaaccgggtcgccagagtcatgacgcaggccctgataccgactagcgaactcgacaccgaaatcacgcaggaaagcatccatagtgatgcagtcggttaatgcaatgccaagttggtcgggatactcttccagccaggcagcaagtgcagctcgctggctgttggctagatccgggctgatttgctgatgtgcctggaaccattcgtgtgcctgtgttcccatcggcgtgagggaaagccgacgcgccagatcgtagttgctggtgcccacaaaccaggattcctgttgcagacgcttaacgatggtttcttgtacttcgcgagaaaaacggcgacgggtgccaaaatccatcagatggaagcgcgacatatcaagaccggcggttaacgccgagaagtcgactaatttgctttccagcgtgtcgagggcttgcgcaacgtcggcctgcggtgagcgatagcgatgtaccatttcactgataaccgccagcaaaggaacttcccagaggatgacttcacgccacgggccgcttaaacgaatatccagcttgccattatcgttggacacggtgacttgttccgggttaaagcggaactcgcgtaaccagttaagatagtcggccttaaagaaaggcagggcagaaagccactgatattcatcatcctgcaggcgcaggtgctgcatcgcctgaacctgttcacgaatagcatcggcataaatacccagcagatcgtcacctcggcaacgaaactccgccgcgacatgcacatcgtaatagtgatgaaacacggcttgctgcatatgcaacttataagcatctgtatccagcaacgagtgcagaacaggagaagcgaattgtgtcataggtgcgcagtagcgtcctcgtacaggagcgtttagtacaataaacatcttcaggaactgctggagtataccttgtttcgcaatttattgaaccccgatcacaccatatgccacctttctggtcgatggcattacgcggtgtatgttataaaaatgtagcaataaaggcgtttgtacctgaaaagatgaagattctgcatagcgcgatttacgcaacaggaatagactgaacaccagactctataaaagatgctaaaggttatttatgactcaacagccacaagccaaataccgtcacgattatcgtgcgccggattaccagattactgatattgacttgacctttgacctcgacgcgcaaaagacggtcgttaccgcggtcagccaggctgtccgtcatggtgcatcagatgctccccttcgtctcaacggcgaagacctcaaactggtttctgttcatattaatgatgagccgtggaccgcctggaaagaagaagagggcgcactggttatcagtaatttgccggagcgttttacgcttaagatcattaatgaaataagcccggcggcgaataccgcgctggaagggctttatcagtcaggcgatgcgctttgcacccagtgtgaagccgaaggtttccgccatattacgtattatctcgaccgcccggacgtgctggcgcgttttaccaccaaaattattgccgataaaatcaaatatcccttcctgctttccaatggtaaccgcgttgcgcaaggcgaactggaaaacggacgccattgggtacagtggcaggacccgttcccgaaaccgtgctacctgtttgcgctggtggcaggcgactttgatgtactgcgcgatacctttaccacgcgttctggtcgcgaagtagcactggagctgtacgtcgatcgcggcaaccttgatcgcgcgccgtgggcgatgacctcgctgaaaaactccatgaaatgggatgaagaacgctttggcctggagtatgacctcgacatctatatgatcgtcgcggtggatttcttcaatatgggcgcaatggagaataaggggctgaatatctttaactccaaatatgtgctggcccgcaccgacaccgccaccgacaaagattacctcgatattgaacgcgttatcggccatgaatatttccataactggaccggtaaccgagtgacctgtcgcgactggttccagctcagcctgaaagaaggtttaaccgtcttccgcgatcaggagttcagctctgaccttggttcccgcgcagttaaccgcatcaataatgtacgcaccatgcgcggattgcagtttgcagaagacgccagcccgatggcgcacccgatccgcccggatatggtcattgagatgaacaacttctacaccctgaccgtttacgagaagggcgcggaagtgattcgcatgatccacaccctgcttggcgaagaaaacttccagaaagggatgcagctttatttcgagcgtcatgatggtagtgcagcgacctgtgacgactttgtgcaggcgatggaagatgcgtcgaatgtcgatctctcccatttccgccgttggtacagccagtccggtacaccgattgtgaccgtcaaagacgactacaatccggaaaccgagcagtacaccctgaccatcagccagcgcacgccagccacgccggatcaggcagaaaaacagccgctgcatattccgtttgccatcgaactgtatgataacgaaggcaaagtgatcccgttgcagaaaggcggtcatccggtgaattccgtgctgaacgtcactcaggcggaacagacctttgtctttgataatgtctacttccagccggtgcctgcgctgctgtgcgaattctctgcgccagtgaaactggaatataagtggagcgatcagcaactgaccttcctgatgcgtcatgcgcgtaatgatttctcccgctgggatgcggcgcaaagtttgctggcaacctacatcaagctgaacgtcgcgcgtcatcagcaaggtcagccgctgtctctgccggtgcatgtggctgatgctttccgcgcggtactgcttgatgagaagattgatccagcgctggcggcagaaatcctgacgctgccttctgtcaatgaaatggctgaattgttcgatatcatcgacccgattgctattgccgaagtacgcgaagcactcactcgtactctggcgactgaactggcggatgagctactggctatttacaacgcgaattaccagagcgagtaccgtgttgagcatgaagatattgcaaaacgcactctgcgtaatgcctgcctgcgtttcctcgcttttggtgaaacgcatctggctgatgtgctggtgagcaagcagttccacgaagcaaacaatatgactgatgcgctggcggcgctttctgcggcggttgccgcacagctgccttgccgtgacgcgctgatgcaggagtacgacgacaagtggcatcagaacggtctggtgatggataaatggtttatcctgcaagccaccagcccggcggcgaatgtgctggagacggtgcgcggcctgttgcagcatcgctcatttaccatgagcaacccgaaccgtattcgttcgttgattggcgcgtttgcgggcagcaatccggcagcgttccatgccgaagatggcagcggttacctgttcctggtggaaatgcttaccgacctcaacagccgtaacccgcaggtggcttcacgtctgattgaaccgctgattcgcctgaaacgttacgatgccaaacgtcaggagaaaatgcgcgcggcgctggaacagttgaaagggctggaaaatctctctggcgatctgtacgagaagataactaaagcactggcttgataaataaccgaatggcggcaatagcgccgccattcggggaatttacccctgttttctcaggcgagtttcagattcaccacgttgcatcacccgttgcaacacctccgcttccagctccgctaatcgcaccgaccctaatcgacgcggacgggggatatccactgtcaaatccagaccaatttttccctcttcaattaacagcacccggtcagccatcgctaccgcttcgctcacatcatgcgtcaccaacagtacggtaaagccgtgctcctgccaaagtgacacaatcaaatcctgcatctcgagtcgcgttaaggcgtccagcgccccgagcggttcatcaagcaacaataatcccggtcgatgaatcaacgctcttgccagcgccactcgctgtttctgcccgccagaaagtgcggcaggccattcccctgcgcgattctccagtcctaccgcagccaacgctcgacgtgcggcatcgcgccactggcctttaaggcctaacccaacgttatcaatcaccgatttccacggtagcagacgcgcatcctgaaacatcattcgcgtgtcttcctgaatttcagccagcggtgtggtgcccgctaacacatcgcctgcggttggcgtttccagacctgccagcaggcgcagcagggtacttttgccaccaccgctgcggcccaccaccgccacaaactgacctgccggaatatgtaaatccagttggttcaggacgatattttccgcgtaatgtttgcttactgcattgagcaacaatggcgtgccctggttcagacgagcagtattcataccgtggcctccttcaaatgataagccgggttccagcgcaaccagaggcgctctaacagctgcgcgctgacgtcagccagtttgccgagcagggcgtaaagaataatagcgactaccaccacgtccgtttgcaaaaactcccgcgcattcatcgccagataaccaatgcctgaattggcagaaatggtttcggcaacaatcagcgtcagccacatcaggcccaacgcaaaacgcacgccgaccataattgagggcagggcaccaggcaggatcacatggataaacagcggtatgccggataatccatagctacgcgccatctccaccaacccgcgatcgatattacggatgccatgccaggtgttgatataaatggggaatagcgtaccgagcgccaccagaaagatttttgcggattcatcaatgccaaaccacaaaatcaccagcgggatcagcgccagatgcggcacgttgcgcaacatctgaattgaggtatccagcagccgttctccccagcgagatagcccgctaatcagtcccaaaatcaaccccagcgatccgccaattgaaaagccaatcagcgcccgccaggagctgatcgccagatgctgccacagttcgccgctggcggagagcgtccagaacgccgtcaccactccttccggtgaaggcaaaatacgcgtcgacagccagccaaccgaggaggccagttgccacaccgccacgatgcccaccggtaaaaaccagggggcaacgcgcaataaccacttcttcactggcgttgccattatttcttccttagctttgcgcgactttacgggggataaaatcattcgccaccgcttcgccttgcggattcagcggctgcggctggggaatttccgggatggcgacatccagaagcgggaacagcaactcgccaacccgatacgcttcttccagatgcggatagcccgaaagcacaaaactgtcgatgccaagcgcggcatattcgttgattcgcgcagcgaccgtaggaccatcgcccaccagcgccgtcccggcaccgccgcgcactaagccaacgcccgcccataaattggggctgatctccagattgtcgcgcttgccgttatgtaacgccgccattcgctgttgccctacggaatccgtccgggcgaatgcggcctgtgctttggcgatagtttcatcatcaagatgcgagattaaccgctcggcggcctgccacgcttcgtcgttagtttcacgaacaatcacatgcagacgaataccgaaacgaattttgcgtccatgcgcggcagctttcgcccgcacttgttcgattttctctttaaccagttccggcggttcgccccaggtgaggtagagatcaacctgttctgccgccaactcctgggcgacatctgacgatccgccaaagtaaagtggcggatacggctgttgaatcgccgggaagagcagttttgctccgcgcacatgaatatgtttaccgttgaaatcgacggtttctctctgcaataaacgccgccagacctgggtaaattccgccgaggcttcgtagcgctcgctatgatcaaggaacactccgtcgcctgccagctcttgtggatcgctgcctgtgaccaggttaaacaacgcacgtccatttgagagacggtcaagcgtggcggcctggcgggcggcaacggtaggtgaggttacgctgggacgcagggcgacaagaaacttcagccgctgcgtcaccgggatcatcgatgcggcaaccagccacgcatcttcgcaggagcgccccgttggaattagcacaccggtatagccaagacgatccgccgcttgcgcaatttgttgcagataaccgtgatcaaccgggcgtgaaccttcttccgttcccagataatgcccgtcaccgtgggtcggtaaaaaccagaacatattcagactcataattgttttccttccagttgagtgggctgccagatgcgctggcgaatatcgacttttttcggcaccagacgattttcataaaacagatctgccgtttgctgctgtaaggcggcaacctcggcgttaaccggtttgatggtggtaggagggcgatgatctaagtaagaggcaatcaccggtgccggtaagcccatcgtttttgccagtaaagcgatgctttgctcgcgctggctgcgggttaacgcatcggcctcactaaaggttgccagtacgccctgaataaaagcgccgtttttttctgcatagggacgagctgccagataaaacgatccagtttgattgagatcggtgccgtctttcagcacccgcacgccgccctgtaataatgcagcagagtagtagggatcccagatagcccaggcgtcaacgttaccttgctggaacgcggcgcgggcatcagcgggcgtcaggtaagtgggttggatatcggtaaacttaagtccggcctgacgcagtgcacgcagtaaaaggttgtgtgaactggaacctttctgaaaggcaactttgtgacctttaagatcggctacggttttgatcgggctgttttctgccaccagaatcacttcggctttgggcttcggtggctcgacgcccacgtacaccaaatcagccccggcagcctgggcaaagattggcggaatatccccggtactgccgagatcaatactgccaacgtttaacgcttccaacatttgcggacccgcggggaactccacccaggagatttttgattccggatagcgtttttccagtaactggtggctttttgccagcaccataccaatactgcctttctgatagcctatacgtaacgcttcaggcgaggattctgcagcaaccgcaaaagtagagacgctaagcaatcccgccagcgccagtttaatgatgttacgcatgggcattacctcgcagagacagaaggtcaggaacctgaacatcgcggcggtgcaatgcctgccagaaagtttctagcgcggtatcaagacgggtttgcagatttggcgtgaactggggtctgtgatggtaatcaattacttgtgagtcatcggcaaacacgccgtgcaggatctcctgagctttcagtgcgcttaaaactggtttaagggcataatcgaccgccagcagatgggccacggtaccgcccgtcgccagcggtagcaccactttgccttgcaaagcgcgttctggcagcaggtcgagcagggttttcaacgcaccggaataggcggctttatacacaggcgtggcgacaatcagcccatcggcctgttgcagctgttcggtgaaggtcttgagtgccggactatcgaaacgagcataaagtagatcttccggggcgaagttttgcagattccagtgataaacctctacatccaggccatttagtttttcccgcgcatattccagcaaggagctggagcgagaaggaaagcgaggactacccgccagggtgatgacacgcatactctctccttataaccaattgttctttttttgttaacattgataacaattcggtcagtctgtcggagagacaagaaaattccaaatataaattttgtgtatctttttctgaaaataaactaaagaaagggctttatatatcacgcatatttatttattggatagtcattagatgttgaatcaatgaattactcgttcagttaatatttaaatattcatgaaatctataaattaaagatttgtcacttattggatttagtatgcttgatttaaatggcggacaattattgttattattaagtctaatgtcatttaaaggcattatcatatttacgaagagatcaggatgataacgatgaaaaaaagtgtattgacggcgtttataactgtggtatgtacaacgtccagcgttatggctgctgatgataatgctatcacggatggctcagtaacatttaatggtaaagttattgctccagcttgtaccctggtagctgcgacgaaagattccgtggtgactttgccagatgttagtgccacgaagttgcaaaccaatggtcaggtttctggcgtgcaaattgatgtgccaattgaattaaaagattgtgatactaccgtaacaaaaaatgcaacgttcacctttaatggcactgcggatactactcagattacagcgtttgctaaccaggcctcatctgatgctgctacaaacgtggccctgcaaatgtatatgaatgatggtacaacggccatcacgccagacacagaaaccgggaacattttgttgcaggatggagatcagacgttgacttttaaagttgattatatcgctacggggaaagcgacttcaggtaatgtgaatgcggtaacaaatttccatattaactattattaatagaactcattaattgttttattaattagtacccctccagtgttctggaggggatattcatattttttaagagtgactatttatgaaaacttgcataacaaagggaattgtgaccgtaagtttaacggcaatattactcagctgctcatccgcatgggcggcaggtaaaggcgggattggacttgcagcaacacgtcttgtttattcagaaggtgaagagcaaatttcactgggtgtacgtaacaccagtccggatgttccttatcttattcagtcatgggtgatgaccccagataataaaaaatcagcagactttattattacaccaccgctatttgtgctgaatccggcaaatgagaatctgttacgcattatgtacattggagcgccgttggcgaaagacagagaaacccttttcttcactagcgtacgggcagtcccttcaacaacgaagcggaaagagggaaataccctgaagattgccacacaaagcgtcatcaaacttttctggcgaccaaaaggtttagcgtatcccttaggcgaggctccggcgaaactgcgttgcacttcgtcagctgacatggttacggtcagtaacccaacaccttatttcattaccctgacagacctgaaaataggtggaaaagtagttaaaaatcaaatgatttccccctttgataaataccaattttctctgccaaagggggccaaaaatagcagcgtaacgtatcgaaccatcaatgactacggggcggaaacgccgcaactcaactgtaaatcgtaagccgtcttcagttaagagagcgagatgtatagaactcatcgacaacacagcctgttaagctctggtggagtgccatcgtttattggtgggctggtggtgtttgtgtcggcagcgttcaatgcacaagctgaaacctggttcgatcctgcttttttcaaagatgatccctcaatggtggccgatttgtctcgtttcgaaaaaggacaaaaaataacgccaggggtttatcgtgtcgatattgttctgaatcagacaattgtagatacgcgcaacgtcaattttgttgagataacgccagagaaggggattgccgcctgtttgacgactgaaagcctggatgcaatgggtgttaatactgatgcgtttccggcttttaaacaactggacaaacaagcgtgtgtgccattggcggagattattccggatgccagcgtaacgtttaatgtgaataaactccgtctggaaatttcagtaccgcaaatcgccatcaaaagtaatgcccgtggttatgtcccccctgaacgttgggatgaagggatcaacgcgctattactgggatattcgtttagcggggctaacagtattcatagcagcgcagacagtgattctggcgacagctattttctgaatttaaacagtggcgttaatttaggcccatggagattgcgcaacaattcaacatggagtcgtagtagtggccaaaccgcagaatggaagaatctcagcagctatttgcaacgggcggttattcctctgaaaggcgaactgaccgtaggtgatgattatactgcaggcgattttttcgatagtgtcagctttcgtggtgtgcagctggcgtcagatgacaacatgctgccagacagcctgaaagggtttgcgcctgtggtgcgtggtatcgccaaaagcaatgcccagataacgattaagcaaaatggttacaccatttaccaaacttatgtatcgcctggtgcttttgaaattagtgatctctattccacgtcgtcgagcggtgatttgttagttgaaatcaaagaagcggacggcagcgtcaatagctacagcgtaccgttctccagtgtgccattactccagcgtcaggggcgaatcaaatacgcggtgacactggcgaaatacagaaccaatagtaatgaacagcaggagagcaaatttgcccaggccacgttgcagtggggcggaccgtggggaacgacctggtatggtggtggacaatatgctgaatattaccgtgccgccatgtttggtctgggatttaacctcggcgatttcggagcaatttcgttcgatgcgacccaggcgaagagtacgctagcagatcaaagcgaacataaaggtcagtcatatcgttttctgtatgccaaaacgctcaaccacttgggcactaactttcaattgatgggctatcgctattcgacgtcgggtttctacaccctttccgacaccatgtataaacatatggatggctacgaatttaatgacggtgatgatgaagatacgccgatgtggtcgcgttattacaatttgttttacaccaaacgtggcaaactgcaggtcaatatctcccagcaattaggcgagtacggttcgttttatttaagtggtagccagcaaacttactggcatacggatcaacaggatcggctattacagtttggctacaacacgcaaattaaagatctttcgctggggatttcctggaactacagtaagtcccgtggtcaacctgatgctgatcaggtgtttgctctaaatttttccctgccgctcaatctgttgctccccagaagtaatgatagctataccaggaaaaaaaattacgcctggatgacctctaacaccagtatcgataacgaagggcacactacacaaaacctgggtttaacggagacattactcgatgacggtaacctgagctacagcgtgcaacagggatataacagcgaggggaaaacggctaatggtagcgccagcatggattacaaaggggcgtttgcggatgcccgagtgggctacaactacagcgataacggcagtcaacaacaactgaactacgctctttcaggcagtttagttgcccattcacagggcattaccctggggcaatcgctgggggaaactaacgttctgattgcagcaccaggcgcagagaatactcgtgtggcgaacagcaccgggctgaaaactgactggcgcggatataccgttgttccttatgccacttcttatcgggaaaatcgaatcgcacttgatgcggcgtcgttaaaacgtaacgtggatcttgaaaatgcagtagtcaacgtggttcccaccaaaggggcgttggttctggcggagttcaatgcccatgcgggtgcaagggtattaatgaaaacatcaaagcagggtataccgctgcgttttggcgcgatagcgacgctggacggcgtacaggctaatagcggcataattgatgatgatggctcgctctatatggcgggtttaccggcgaagggaacaataagcgtgcgctggggcgaagctcccgatcaaatttgtcatatcaattacgagcttaccgaacaacaaattaactctgcgattacgcgaatggatgccatatgcagataatctttggagaaaaatgcgtgtcattactacgactattttttgccgccgtcttaatgctatggtgcgctcaaaccgctgcttatagcgggcagtgtcatactactcaggggaatccgtatattggcgtcaattttggcgttaaaaccctggaggaagaagcaaatacggcaggggtagttaaagacaaattttatcagtggaacgaatcgaatgattattatgtttcctgtgattgcgataaagacaatgtcagaagtggccgatgggcattcgccgcggattcaccgttagtctatttaggcgacaactggtacaaaattaatgactatcttgccgccaaagttttattgcaggttaaaggcagttctcctactgcggttcctttcgaaaacgtgggcacagggggggatacccgatggcatatttgcgaccctggcggtcaacgtttaggtgggcagggggcaagcggtaatagcggtagcttttccctgaaaatattgcagccgttcgttggctcggtcgtcattcctcctatggcgctggcgcgattatatgaatgctacaacatacccgcaggtgattcctgcacgactacaggtacaccggttttagtgtattacctgtctggtacgatcaattcacttggctcatgttccgtcaatgccggagagacaattgaagttgatttaggtgatgtcttcgctgccaatttccgtgttgtagggcataaacctcttggggccagaacggcagaacttgcaattccagtcaggtgtaacacgggaaacgcgggattagttaatgtcaacctgagtctgacggcaaccacagaccccagctatccccaggcgattaagacgtcacgtcctggcgtgggcgtggtggtgaccgatagccagaacaacattatttcccctgctggtggaacattaccgctctctattcctgatgatgcagacagtatcgcgcgaatgaatgtctatccagtcagcacgacaggtgtaccaccagaaaccgggcgatttgaagccacggcaacggtgagaataaattttgattaacgcgtgaacgtatgaagaaaaaaacgatatttcagtgcgttatcttgttctttagcattcttaacatccatgtcgggatggctgggcctgaacaagttagtatgcatatttatgggaatgtggtcgatcagggctgtgatgtcgccaccaaaagtgcattacaaaatattcatattggtgattttaatatcagtgattttcaggccgcgaataccgtaagcactgctgctgatttgaatatcgatatcaccggttgtgccgctggtattactggcgcggacgtcctttttagcggcgaggctgacacccttgcgccgacactgctcaaactaactgacacaggcggaagcggtggtatggcaacggggattgccgtgcaaattcttgatgcgcaaagtcagcaagaaatcccgctcaatcaggtccagcctcttacgcccttaaaagccggggataacacactcaaatatcaacttcgttataagtccacaaaggcgggagcaacgggcggtaatgcgacggcggttctctattttgatctggtttaccagtgaaggagtgatgttgaaacggataatctggattctgttcttattgggattaacgtggggctgtgagctatttgcccatgatggcacggtcaacattagcggatcgtttcgccgtaatacatgcgtgctggcacaggatagcaagcaaatcaatgtgcagttaggcgatgtctcgctgacacgtttttctcatgggaattatggcccggagaaatctttcatcattaatttgcaggattgcggaacagatgtcagcacggttgacgtcaccttttcaggaacccccgacggagtgcagagcgaaatgttgtccattgaaagtggtacggatgcagccagcgggctggcaattgcgattctggatgatgcgaagatattgattccgcttaaccaggcgagtaaagactacagcctacatagcggtaaggtgccattaactttttatgcgcaattgcgacctgtcaatagcgatgtgcagtcgggtaaagtgaatgccagcgcgacatttgtacttcattatgactaatacgtggaacagattggcgctcttgattttcgccgttttatcgctgctggtggcgggtgaattgcaggcaggagtggtggtcggcggaacgcgatttatctttccggcagacagagaatcgatatctattttactgactaataccagtcaggaatcctggcttattaacagtaaaatcaaccgcccaacgcgttgggccgggggggaagcgtcgacagtgccagcaccattactggccgctccgccacttattctcctgaagcccggtacgacaggcacgttgcgcttgctgagaacggaaagcgacatcttgcctgtggatcgcgaaacgctatttgagttaagcattgccagcgtgccatccggcaaagttgaaaatcagagcgtaaaagtggcgatgcgctcggtatttaaactgttctggcgacccgaaggtttgccgggcgacccgctggaagcttatcaacaattacgctggacacggaattcgcagggtgtacaactcactaacccaacgccttattacattaacctgattcaggtgagtgtaaatggtaaagcgttaagtaatgtgggagttgtgccgcctaaaagccagcgtcagacaagctggtgtcaggcaatcgcaccgtgtcatgtcgcctggcgggcgataaatgattacggcgggttgagtgcaaagaaggagcaaaatctgccctgaaacaggttcggaaaacgtttgcgttttttttgccgcaggtcaattcccttttggtccgaactcgcacataatacgcccccggtttgcacaccgggaatccaggagagttcatgtactaccccttcgttcgtaaagcccttttccagctcgatccagagcgcgctcatgagtttacttttcagcaattacgccgtattacaggaacgccgtttgaagcactggtgcggcagaaagtgcctgcgaaacctgttaactgcatgggcctgacgtttaaaaatccgcttggtctggcagccggtcttgataaagacggggagtgcattgacgcgttaggcgcgatgggatttggatcgatcgagatcggtaccgtcacgccacgtccacagccaggtaatgacaagccgcgtctctttcgtctggtagatgccgaaggtttgatcaaccgtatgggctttaataatcttggcgttgataacctcgtagagaacgtaaaaaaggcccattatgacggcgtcctgggtattaacatcggcaaaaataaagatacgccagtggagcagggcaaagatgactatctgatttgtatggaaaaaatctatgcctatgcgggatatatcgccatcaatatttcatcgccgaataccccaggattacgcacgctgcaatatggtgaagcgctggatgatctcttaaccgcgattaaaaataagcaaaatgatttgcaagcgatgcaccataaatatgtgccgatcgcagtgaagatcgcgccggatctttctgaagaagaattgatccaggttgccgatagtttagttcgccataatattgatggcgttattgcaaccaataccacactcgatcgttctcttgttcagggaatgaaaaattgcgatcaaaccggtggcttaagtggtcgtccgcttcagttaaaaagcaccgaaattattcgccgcttgtcactggaattaaacggtcgcttaccgatcatcggtgttggcggcatcgactcggttatcgctgcgcgtgaaaagattgctgcgggtgcctcactggtgcaaatttattctggttttatttttaaaggtccgccgctgattaaagaaatcgttacccatatctaattatttcttcgaattcctctttataagataatcagggctttattttcagccctggttgttttatattcatcgctgttgcttatttagacattttgtacttttattgttgaggttattaagcgaagcgacaatggattgtgttgctgcggttttatagggtaggggagaggcagatgcgaattaaaccagacgataactggcgttggtattacgatgaagagcacgatcgaatgatgctcgatttagccaatggtatgctatttcgctcacgttttgcgcgcaagatgttgactccagatgccttttctcccgcaggcttttgcgttgacgacgccgcgctctatttctcttttgaagaaaagtgccgcgattttaatttatctaaagaacaaaaagccgaactggtgctgaatgcactggtagcaattcgctatctcaaaccgcaaatgccgaaaagctggcattttgtttcccatggtgaaatgtgggtgcccatgccgggcgatgcggcctgcgtttggttgagcgatactcacgagcaggtcaatttgctggtcgttgaatctggcgaaaatgccgcactatgcctgctggcacaaccctgcgttgttattgcgggtcgcgcgatgcagttgggcgacgccattaaaatcatgaacgacaggctgaaaccgcaggttaatgttgacagcttcagcctcgaacaggcagtctaacgcgccaacttaagtgcagtcttcggtacacagctacagcaaagaatggtgccatcatcgcccattgctgattttttcagcggcgtgacttcgccttctaaaagctgaacacggcaacttccacaaatgcccgcgcggcaagaataagggatacgaattccctgattttctaattgctccagcaacacctgttggttatttccacgaaatgcctgtccctgccagtcaatatctacatttgcgtccggttgttgcgtgatgttggcggtatcatcagcggcagctgcgccgtaaatttttgccggagccgttgccagaatttccacctcatcgccaacgcgaatcacgccgctattacgggcaattaaattctgaccaaaatcgacatcgccgttatcctgggcagtgcggaaagattgcaatgtttttaatggttcgcctgccggatgtttttgccctttttctgggctgacggtggtgaaaatacagcggctacaaggtttaaccacatcaaacaccacatcaccaatgcgaatcactttccagcgatcttcttcccaggctgacgcgccggaaaccaccagattggggcggaattgctccatttttacactggccggacaacgttgttggagatcacgtaacgaggcttcgttagcaagaaggtaaggatagccatcagcaaatgacagaggtacagtgttgtggcgtttcacgcgccgggtcatttgtggccccacccagcgtaattgcacttcgcgggagaaaaatccacttagccatttgttgatcgcgtctggcgcaattcgcgcggtaaaatgtgtgccccaaacttcggttggtgcgtcttgtgtggcgaaatcagcaaaacgaacatatgcgctactgccatctggtgcggtgagatgcaagccatcatgcacaggtgaaggagtaaaccgtaccatctggggaaactggcgagcggtaataaacgtaccgtcaggttccgtgatcataaagatgcgatcgaaggccagaccactgacatctgccagagcatgtgtaagaccaatgccgcgcatcgatttaacaggatgaataaaaagccggattaatgtcgccacggtgcggtcctcaaatgaaaataagccctcaactttatgacatgacgcgcttattagctataatgcgcaacaattttcttagcgcctgtcccattaggctattttatttgtcagtttggccctgggttatgctcgaaatcctcacgtacttgtgtacgctccggtttctccgcgctgtccatgtccagactgactgcaacaattacgcctactgcggtaggctcttagagtaaaagtgacgatatgaattctctgtttgccagtacggcccgtgggctggaagagctgttaaaaactgaactggaaaacctgggggccgttgaatgccaggtggttcagggtggggtccatttcaagggcgacacacggcttgtttaccagagcctgatgtggagccgcctggcctcgcgtattatgttgccgctgggcgagtgtaaggtttacagcgatttagacctctatctcggtgttcaggcgatcaactggacagagatgtttaatcctggcgcgaccttcgctgtccacttcagtggtttgaatgacaccatccgcaacagtcagtacggcgcgatgaaagtgaaagacgcgatcgtcgatgctttcacgcggaaaaatctgccgcgtccaaatgttgatcgcgatgcgccggatatccgcgttaacgtctggctgcataaagaaaccgccagtatcgctcttgatctgagtggtgatggtttacatctgcgtggctatcgcgatcgtgctggtattgcgccgatcaaagaaaccctggcagccgctattgtgatgcgatccggctggcagccaggaacaccgctgctcgatccgatgtgtggttccggtacgttgctgattgaagcagcgatgctggcgaccgatcgcgcaccaggcttgcaccgtgggcgttggggctttagcggctgggcgcagcatgatgaagctatctggcaggaagtgaaagcggaagcgcaaactcgcgcccgtaaaggcctggctgagtatagctctcatttttacggttcggacagcgacgcacgggtgattcaacgtgcacgcactaacgcccgtcttgcggggattggtgaactgatcacctttgaggtgaaagatgtcgcgcaactgaccaatccgctgccgaaagggccgtacggcacagtgttgagcaacccgccatacggggaacgtctggacagcgaaccggcgctgattgcgctgcatagcctgctgggtcggatcatgaaaaaccagtttggtggctggaatctctctttgtttagtgcctcgccggatctgctaagctgcttgcagctgcgtgcagacaaacagtacaaggcgaaaaacggcccgctggactgcgtacagaaaaattaccacgttgccgaaagcactccagacagcaaaccggcgatggtagcggaagactacaccaaccgcctgcgtaagaacctcaaaaaattcgagaagtgggctcgccaggaagggattgaatgttaccgcctgtatgacgccgatctgccagaatataacgttgccgttgaccgttatgccgactgggtggtggtgcaggagtatgcgccgccaaaaactattgatgctcacaaagcgcgtcagcgtctgttcgatattatcgctgcaaccatttcggtactggggattgcgccaaacaaactggtgctgaaaacccgtgaacgccagaagggcaaaaaccaataccagaaactgggcgagaagggcgagtttcttgaagttaccgaatataacgctcacttgtgggtgaacctgacggattatctcgatactggtctgttcctcgatcaccgcatcgcccgtcgtatgctcggtcagatgagcaaaggcaaagatttcctcaacctgttctcttataccggcagcgccaccgtgcatgcgggattaggcggtgcacgcagcaccaccaccgtggatatgtcgcgtacttatctggaatgggcagaacgcaacctgcgtctgaatggcctgaccgggcgtgcgcatcgcctgattcaggccgattgcctggcgtggctgcgtgaggcaaatgaacagttcgatctgatctttatcgatccgccaaccttctctaactcaaaacgaatggaagatgcgtttgatgttcagcgcgatcatctggcgctgatgaaagatttgaaacgtctgctgcgtgcaggtgggacgatcatgttctcgaacaacaaacgtggcttccgtatggatctcgacggcctggcaaaactgggactgaaagcacaagaaattacgcaaaaaacgctctcccaggatttcgcccgtaaccgccagatccacaactgctggctgattaccgcagcctgaaaggaatagtaatgtcattaatcagtatgcatggcgcatggctgtcgttcagcgacgcgccgcttctcgataacgcagaactgcatatcgaagataacgaacgtgtttgtctggtgggccgcaacggcgcaggcaaatcgacgttaatgaaaatcctcaaccgtgaacaagggctggatgacggtcgcattatttacgagcaagatttgattgtagcgcgtctgcaacaggatccgccgcgtaacgttgagggtagcgtttatgatttcgttgccgaaggcattgaagaacaagcggaatatctgaaacgctatcacgatatttcgcgcctggtgatgaacgacccgagcgagaaaaatctcaacgaactggcgaaggttcaggaacagctggatcaccacaacctgtggcagctggaaaaccgcatcaacgaagtgctggcgcaactggggttagatcctaacgttgcgctgtcgtcgctttccggcggctggttgcgtaaagcggcattaggacgcgcgctggtgagtaatccgcgcgtgctgttgcttgatgaaccgacaaaccacctggatattgaaaccatcgactggctggaagggtttttgaaaactttcaacgggacgattattttcatctcccacgaccgttcgtttatccgcaatatggcgacgcgcattgttgatctcgatcgcggcaagctggtgacctatccagggaattacgaccagtacctgctggaaaaagaagaagccctgcgcgtggaagaattacaaaatgccgagttcgatcgcaaactggcgcaggaagaggtgtggatccgccaggggatcaaagcacgccgtacccgtaatgaaggccgcgtacgcgccctgaaagcgatgcgtcgcgaacgtggtgaacgtcgcgaagtgatgggtaccgcaaagatgcaggtggaagaggccagccgctccggtaaaatcgttttcgaaatggaagacgtttgctaccaggttaacggtaagcaactggtgaaagatttttctgcccaggttctacgtggcgacaaaattgccctgattggtccgaatgggtgcggcaaaaccacgctgctaaaactgatgctcggtcagcttcaagcggacagcgggcgtattcacgttggcaccaaactggaagtggcttatttcgatcagcaccgcgcggaactggatcccgataaaacggtgatggataaccttgccgaaggtaagcaagaggtgatggttaacggcaagccacgccacgtattgggctatttgcaggactttctgttccatccgaaacgggcgatgacgccggtacgtgcgctttctggcggtgagcggaaccgcttgctgctggcgcgtttgttcctcaaaccaagcaacttattgattcttgacgaaccgaccaacgatcttgatgtcgaaacgctggaactgctggaagaactgatcgacagctatcagggcacggtattgctggttagccacgatcgtcagtttgtcgataacaccgttacagaatgttggatcttcgaaggcggcggtaaaattggtcgttatgtcggcggttatcatgatgcccgtggtcagcaagagcagtatgtggcgctcaaacagcctgcggtgaaaaaaaccgaagaagccgccgcggcaaaagcagaaactgtaaaacgcagcagtagcaaactaagctataaattgcagcgcgaactggagcagctaccgcaattgctcgaagatctggaggcgaagctggaagccctacagacgcaagtggcggatgcttccttcttcagtcagccgcatgagcagacgcaaaaagtgcttgctgatatggctgctgcagagcaggagctggagcaagcctttgaacgctgggagtatcttgaagcgttaaaaaatggtggctgatcgcaaaatagtcgatttaaacagagacagctgacaacggtaaaattgcctgatgaactgggtttatcaggcatgaaaaccaacactttgttagtcatctgtaaaatagcgcatcattaaggagtaccaatgtgcgaacatcatcatgccgcgaagcacatcctgtgctcgcagtgtgacatgctggtggcgttaccgcgccttgagcatggtcagaaagcggcatgtccccggtgtggcacaacgttaaccgtggcgtgggatgcccctcggcagcgtcccaccgcctatgcgttggctgcactgttcatgctgttgctgtccaacttgtttccttttgtgaatatgaacgttgcaggagttaccagtgaaattacattactggaaattcccggcgtgcttttttctgaggactacgccagcctcggcacctttttcctgttgtttgtgcaactggttcccgcgttttgtctgataaccattctgttactggtgaatcgcgcggaattaccggtccgtttaaaagagcaactggcacgggtgctttttcaactcaaaacctggggaatggcggagattttcctcgcgggtgtgctggtcagtttcgttaaactgatggcttacggcagcattggggtaggcagcagctttctcccctggtgtttattttgtgtcctgcaactgcgcgcttttcagtgcgttgatcgtcgctggttatgggacgacatcgccccgatgccagaactgcgccagccgctaaaaccaggcgtcacggggatacgtcaggggctgcgttcgtgctcctgttgtacggcaatccttcctgctgatgaacccgtgtgcccgcgttgtagtaccaaagggtacgttcggcgtagaaacagcctgcagtggacactcgcgctgcttgtaacgtccatcatgctgtatcttccggctaatattttgcccatcatggtgacggatttattaggctcgaagatgccgtcgacgattctcgctggggtcattctgttatggagcgaaggctcttatcccgtcgctgcggtgatctttctggccagtattatggtgccaacgttaaagatgatcgccatcgcgtggctgtgttgggatgccaaagggcatggcaagcgcgacagtgaaagaatgcatttgatttatgaagttgttgagtttgtaggccgctggtcgatgattgacgttttcgttatcgcggtgctctcggcgctggtgcgtatgggaggtttaatgagtatttatccggcaatgggtgcattaatgtttgctttagtcgtcataatgacaatgttttctgctatgacgtttgacccgcgtttgtcgtgggatcgtcaacctgaatcagagcatgaggagtcctgacagtatggaatctaataatggggaagccaaaatccagaaagtgaagaactggtctcccgtgtggatatttcctatcgtcacggcgctcattggggcctgggttcttttttatcattacagccatcagggaccggaagtgaccctgatcaccgcgaatgcggaaggaattgaaggtggcaaaaccaccattaaaagccgtagcgttgacgtcggcgtggttgaaagcgccacactggctgatgatttgacgcacgttgaaatcaaagcgcggctgaattccggtatggaaaaattgctgcataaagacaccgtcttttgggtggtgaaaccgcagattggtcgcgaagggattagcggcctgggaacgctgctgtctggagtttatatcgaactgcagccaggcgcgaaaggcagcaaaatggataaatacgatttgctggactcgccaccgttggccccgcctgatgcgaaaggtatccgtgtgattctcgatagcaaaaaagccgggcagctctcgccaggagatccggtgctgttccgtggctatcgggtaggttcggttgaaaccagcaccttcgatacacaaaaacgcaatatcagctatcaactgttcatcaatgcaccttatgaccgactggtgaccaacaatgttcgcttctggaaagatagtggcattgcggttgatctgacgtcagcagggatgcgtgtggagatgggctcattgacaacgctgctgagtggcggtgtcagctttgatgtgccggaaggtctggatttagggcagccagtggcaccgaaaacagctttcgttttgtatgatgatcagaagagcattcaggattcgttgtacaccgatcacattgattatctgatgttctttaaagattcggtacgcggtctgcaaccgggagcttcggtagagttccggggtattcgcctgggtaccgtaagcaaagtgccattctttgcgccgaatatgcgtcagacatttaacgatgattaccgtattccggtactgattcgtatcgagccagagcggctgaaaatgcagcttggcgaaaatgcggatgttgttgagcaccttggcgaattgttgaaacgtggtttacgcggatcgctgaaaaccggaaacctggtcactggtgcactgtatgttgatctcgatttctatccaaatacgcctgcaataaccggtattcgtgaatttaatggttatcagattatcccgaccgttagcggcggcctggcgcaaatccagcaacgactgatggaagcgttggataagatcaacaaactgccattgaatccgatgattgaacaggcaaccagtacgctttctgaaagtcagcgcacaatgaaaaacctgcaaacgacgctggatagcatgaacaagatcctcgctagccagtcgatgcagcagttgccgacggatatgcagtcaacgttgcgtgaattgaatcgcagcatgcagggcttccagcctggctccgcagcctacaacaagatggtggcggatatgcagcgccttgatcaggtgttgcgagaactgcaaccggtgctgaaaacgctcaatgagaagagtaacgcgctggtatttgaagcgaaggacaaaaaagatccagagccgaagagggcgaaacaatgaaaaagtggctagtgacgattgcagcactgtggctggccggatgcagctccggcgaaattaataaaaactattaccagttacctgtggtgcagagcggtacacaaagtaccgccagccagggcaatcgtctgttatgggtagagcaggtcactgttcctgactatctggcggggaatggtgtggtttatcaaaccagtgatgtgaagtatgtgattgccaacaacaacttgtgggccagcccgttggatcaacagttgcgcaacaccctggttgccaacctgagtacgcaactgcccggctgggtggttgcctcccagcctctgggaagcgcccaggacacgctcaatgttaccgtaacggagtttaacggtcgctatgatggcaaggtcattgtcagtggtgagtggctgttgaaccaccagggacaactgatcaaacgtccgttccgtctggaaggagtgcaaactcaggatggttacgatgagatggttaaagtgctggccggtgtctggagtcaggaagccgcttctattgcacaagagataaagcgtctaccttaattataaagatttgtaaatataaccgtctccggtatgttgcctgaggcggtttttttgtctctaacgtgcggaaaaatttgttcctcttcacattttttgtacaaccgacatgcccgtgtagctcacaaatatgacagtggcgtgaattttgcgcattgacggcagttatgattcgcggtattgcttaactgtgattgcacatttagtaatcactgttttcttttccaccagaaaccagtatgagggaaacgaggcatgaagagacaaaaacgagatcgcctggaacgggcacatcaacgtggttatcaggccggcatcgccggacgctcaaaagaaatgtgtccctatcagacgctgaatcaaaggtcacaatggctgggaggctggcgagaagccatggcggacagggtagtaatggcctgattctgtctctttaaaaagaaacctccgcattgcggaggtttcgccttttgatactctgtctgattataatcagaaggcagacgtatcctggaacagaccgactttcaggtcgctggcggtatagatcagacgaccatcaaccagcacttcgccatccgccaggcccataatcagacgacggttaacaatgcgtttaaagtgaatacggtaggtcacttttttcgctgtcggcagtacctgaccagtgaatttcacttcgccaacgcccagcgcgcggcctttaccttcgccgcccagccagccgaggtagaaccctaccagctgccacattgcgtccaggcccaggcatcccggcataaccggatcgccaataaagtggcatccgaagaaccacagatccggattgatatccagttctgcttcaacataccctttgtcgaagttaccacccgtttcggtcattttgaccacacggtccatcatcagcatgttcggtgctggcaattgcgggcctttagcgccaaacagttcaccgcgaccagaggcaagaaggtcttcttttgtataggattcgcgtttatctaccatgttctctgtaagccttattttattgaagcacgcaggatagctaacacgtgtacgctgaacaagtccgatcagttcggaataaaccagttcagccaacgtaatggccatggaaaacggtgacgtccttcctgttgcgatgcttgcgcgatacgttcctggatggtttgcatcagcgtcgtttggccttcgccatcccacaccagatttaataataacggcagtgcgtcagtcacatcgtctactgcccagatggtgaatttgccttcttctaccgctttcaccagttcactgtgaagacttaaatggcgaacgttagctgtggggataatgacaccttgtttcccggttaactcacgttgctggcaaatagcaaagaagccttcgattttctcatttaaaccaccgaccggctgggcgcgaccgaactgatcgactgaacctgtgatagcgatactctgattcaccggcacatcggcgagggcgcttatcagggcgcagagttcagccatcgaggcactatctccatcaacttcactgtatgactgctcaaatgtcagcgatgctgagaaggggatctgttgctcaagctgtagttccgacatcaggaacgcttgcatgatcatcatccctttcgcatggatattgccgccaagctccgctttgcgttcgatgtcggtgaattcaccatcgccaatatgcacaacgcagctaatgcgagaaggttcgccaaaagcgcgtggatgacccggaaattcaatgaccgaaagggcgttaatttgcccgatgcgttcgccttcggtttcaatcaggatttgctcctgaaggatctcatcctgcatacgttcagcgaggaaaccttcgcgccattcacgctgctgcagcattaagtttagctgctcgccggagaaggtgtcgccatcacacagggaggcgacctctttacactggcggaggatccactgcgggctaagcggaagtgtttcttgttcaccggtgtagcgtgctgcttcgcggataagtatcggccaggcatccgctcccggtgcaggtaagtgattatgtctggcggtaaatgtcacccagcgacaccactgggttactgactccgcatcgacaatctgcagagtatcttcaaattcgctataaatagcctgctctgaaagctctggctccatctcctggaaatcagccaatgattcgcgttcgcctaccagaatgactttcagcttcaatggcatcgaaggcacagagacggggagagggcgcgactcatcaaacgcaacccagtcaaaacgctcgcggttaacgatatttttcagccgcatccacagcagaggttgcgccagcagtgtacgcaaagagataatgagaataccgccatttgcctgatgcaccagaccaggctgcagggtaatgtcgccattaaactggcgcaggcagccaaagagttgctccgcttctacccagtcggcagcgacaacttgcgttaaagtcgcaaaattatcatctgcactcactgcgtgacgtaagcggatggagtggccggaaacctcatagtgaccgcccaccagttggcctgcatcgctttgtagcgtacgcgcggcattggcaataagattcagatactcagactcttccggggccttcgccagcataaaagaggaggatgctcgcgtatgcagcaactgctccagcgcaaattgcagccgcggttgagtatcactgaataaaggatcgttttcgtcaatcaaatgtggctgagcaaatatttcctgatagctatcggtatcaggaaccaggtcacgccatgcaagtttcgtaatggtcaaagttgatgttttttagtctgttgtcaaagccgcgattataccgtaaccggcactacagcacacgtagaaagcaccgacaatactcctggcatgggcgttaaagctcacaggatggagattcttttcttcactggcctaaaaagctgatattctgtaaagagttacacggtaacattgagatcgctatgaaatatcaacaacttgaaaatcttgaaagcggttggaaatggaagtatctggttaagaagcatcgcgaaggggagttaatcacccgttacatagaagccagtgccgcccaggaagccgtcgatgtgttgctctcgctggaaaatgaacccgtgctggtaaatggctggattgacaagcatatgaatccggaactggtcaatcgcatgaagcaaaccattcgggcaagacgaaagcgccattttaatgcggaacaccagcatacgcgcaaaaaatcgatcgatctggaatttattgtctggcaacgtctggctggtcttgcgcagcgtcgcggtaaaacgctttctgaaacgattgttcagctgattgaagatgcggaaaacaaagagaaatacgcgaataaaatgtcttctctgaagcaggatctgcaggcattgctgggtaaggaataactgacgaaagtcagttcaatttactaaaggcaaaaaaaaccccgcagcagcggggtttttctaccagacgagaacttaagcctgcggctgagttacaacgtctttgatacctttaacttcgatctctacgcgacgatccggagccaggcagtcgatcagtgcagcacgctgtttcacgttgtcacaggtgttgccagtaaccgggttggattcgcccataccacgtgcggagatcttgtctgccgggatacctttggagatcaggtaatcaacaacagactgagcacggcgctcggacagaccctggttgtaagcgtcagaaccgatgcggtcggtgtaacccagaacaactacggaaccgtctttcggatccaggttgctcagctggctgtacagctgatccagagcagcctgaccttccggtttcagggttgctttgttgaagttgaacagaacgtcagacttcagagtgaagtgcttggtctgtacttccggtgccggagctggagccggagcaactactggagctgcttcgccctgaccgaaacggtaggaaacacccaggctcagcatgccgttgtccggacgagtgccgatggtgtgtgcgtcaccgatgttgttggtccactggtattccagacgggtagcgatttcaggagtgatcgcgtactcaacaccgccagcgaagaccggagaaacgccggtgtcgtggtttttaccataaacgttggatttagtgtctgcacgccataccatgccacccagacgagtgtagatgtccaggtcgtcagtgattgggtaacccagtttagcggtcagttgaacgccctgagctttgtatgcaccgttttcaacgctgcctttgtacggcatacgacctaaccagtcgtaacccatttcaaagccaacatacgggttaacctggtaaccaccaaaagcaccagcgcccagttggttttcatgggtcgggccattgttgttgatgaaaccagtgtcatggtactgggaccagcccagtttagcaccagtgtaccaggtgttatctttcggagcggcctgcgctacggtagcgaaaccagccagtgccactgcaatcgcgatagctgtctttttcattttttgcgcctcgttatcatccaaaatacgccatgaatatctccaacgagataacacggttaaatccttgaccgggggatctgctcaatattaactctaccgatatcttcggcttatgccgagcacccctggcgatgtaaagtctacaacgtagttgaaaacttacaagtgtgaactccgtcaggcatatgaaaaaaaagtcttgtataaggtatgtttaatcttttttgtcagcgacaatttacagaagagaatcgcggaaaccgcttcagacaagcctccgcaaggaaaattagtcacgactgaaagcattggctgggcgacaaaaaaagttccaggattaatcctaaatttacttaatgatacaaattagagtgaatttttagcccggaaagttgtctcgtggcgtgagaggatgcgcttaccggacgcataataaaccccatagcgttaccttcatttgccgcatcaacaagttcagcatgctcttcttcagtcaaatcatctgccaaccaaccgatcaccacactgtaattgcccgtgcgtaaagcgcgaaccattgactccacagtgtggcaaggggagagctggctaatctgcattactttcgttaagggtagcccagatgcctgaacccattcccgactcagtttttgttgcggtgttaaccagagttgccagcgcgattgctgaccgagttgctgtaacaatggcaacagtagaagttgcgtcatcatgggctgatcttcgcgatagacaacttcactgataagcccggctgtagtgttttccgtagagacacgcgcaattttacttgctgcggatgagaacgacgaagaacgatgtgcatagcctgaagtgtacataatcaatccagcccctgtgagttactgtatggatgtacagtacatccagtgacaacaaagatcaaccctattttcggaaagagcctcgcaaattttgtcgttggtgacgggaaaacataaattaatcttgccccttaagaataagttgcctattttcgtagttaacggatccgttaatgtgaatcattcttttatgttatgattttaaaaggaattttatgaaaagcctctcctataagcggatctataaatcacaagaatacctggcaacgttgggcacaattgaataccgatcattgtttggcagttacagcctgaccgttgacgacacggtgtttgcgatggtttctgatggtgagttgtatcttcgggcttgtgagcaaagtgcacagtactgtgtaaaacatccgcctgtctggctgacatataaaaagtgtggccgatccgttaccctcaattactatcgggttgatgaaagtctatggcgaaatcaactgaagctggtgcgtctgtcgaaatattctctcgatgcagcgctgaaagagaaaagcacgcgcaatacccgggaaagactgaaagatttgcccaatatgtcttttcatctggaagcgattctcggggaggtggggattaaggatgtacgggcgttacgtatacttggggcaaaaatgtgttggttgcgactgcggcagcaaaacagtctggtgacagaaaagattctgtttatgcttgaaggtgccattatcggcattcatgaagctgcgctcccggtggcacgccgccaggagcttgcagaatgggctgactctcttacgccgaaacaggagtttcctgcggaacttgagtaatctggcgttgcagacgaccaatctcaggcagtaatgcaatcaataatccaacttgttgtacgaccagaggttctttgctgtctgcccgtggttcaagttgctgcatccgctgtttcaggctagctaatgcctcattgacgcgttcttcatcagcaggttgatgatgtaacgcgtcatcaacatagcaaactgcgtcatcaagaaacgccagaatttcaggattagttaactgctcccggtgagcaccgagggctgagatatagctggtaaacgtatggttaaggcacagcaaccgaaacgcggcttcgcgaatttgcggggtaacgttcggctcgctggacatatttgataccaccgacgccagctcagcatcacggttgtgtgcatcgcggcgggcaatacgatacgccagacggttatcacgcccctgatggtattgctccagtatggcatcgagataccgacagttggcctctgtggcgcgttcgagcatgcgcggcagattgcgaaactgccagtcaggccagatgtagctcactgccgcccacgcaatggcacaaccaatcagcgtatcgattacgcgaggtaacgctacttcaaaaccttcacccagtaagttaaaacacagtagcaccaaaagtgtgatgaacatcgttgcatgagcgtattgcacgttacggaaggcaaaaaagagcacgccggtaataaccagcagcaccagctgcccttccagtgatggcacaaaccacagcacaggaatgccaatggcgatacctaccagcgtaccaataatccttaacttcaggcggtggcgcgtggcgttatagtttggctggcagacaaacaaacttgtcagcaagatccaatacccgtgatgcattccggttatctgaatgatggcgtagccgaagcacaacaccagcgacattcttaccgcatgacggaagagggcggattccggcgtgaagtgacggctaagacgcagccagatatcactcaacccgtgcgggctgtcatcagcgagctcattttcgtcattattatggggtagtgcctgggcctgttctgattcaattgttgccagttgggcatcaatggcgcgtaaattgttcagcaaaaatcccagtgttttgagtaaatcggcgggtgcgccgttatcgcgcatccgctccagcgcagcatcaatatgcgtaaaagcgcgctcaaaatgcggatcatgttgataaggctgacgcaacaaaatacagcgtgacagttgctggcacgcctggccctgcatcgacatcagccgctgaaaacggaacagcacgtcgctgtggcgaaaatgttcacgcaatgtttgatactgaatatgagaagagctggcacgctcgtgaatatcctgtgcgacaaagtaataatgcagcgtgcgacgcgttccccgttgaccacgatcgccacgtaagcgggtcagcagcgagagtttcgtctgattcaatgtcgccatcagcagaccgttggcgagagccaaatcgtacagcggtgcctggctttgatcttcaatatcaggatcaaacatgcgcgacttgagctcaagataacgcgccagttgttcatagcaacgcgccaggttgtcctgcagcgggcggaccgggaacagcagatgaccaataagtgtcaggacgttgtaccagacggcaccggccagcagatacatcggctgctgataccagtgctcatacagtgatgttcccaacatagtgtaaatggcgatcagcaatgcaccgaaggcaattgttgcatagcgttgacccagaccgccgagcaaaatgaagccgctggtagagagcgttaagccaatcgcaaatagccagggccagggaaacagcaattctactgaggccgaggcgataaaaaagcagaacagcgtaatgatgaggttacgcaaacgtcccgccagtcggtcatcgagatcggtcagcgccgctgccaccatccccagcgttagcggaatcgtcagttttacatcacccagccaccacggaaacgctgtggttccacaaagcgcaataaaaatacgcgcgtaatacagccaggcgctgttccaggtatagcgtttgagcaaaggacttagcataaaggccatattagtggattattcaaaacgacgacgtgcattggcttcacgcgcagcttgcgctgtttctaccgataccacgcgacgaccaaccggccatagtgcaatagcggcaattttaaagttcgcaatgccgacaggaatgccaatgattgaaatacattgtgcgatgcccgttgcaatgtgcatcaggcataaccaccagccaaagaaaatcagccagaaaatattcaataccgtaccgccagtattcagcagcacatttttgccagccgggttcagttcatcgacatgaatagcttcattgccataaggcaccagagacagtttagtgatctcccagcaggatcgtgtcagcggtaaggtaaaaatcagcacaatactgaccagagtcgccaacagccagcccagagtggtggcaaatccgccaagcacaaagttcagaatgttcaaaacggtacgcataaaacctcgctttactgtggttttcagtaatgggcggcaattgtaacgtttttttgggctggagcacgttttctctgacggttacactgataagaaataatttcgtgtggatctacagagtcatggaactgaaagcgacaacgcttggaaaacgtctggcacagcacccttacgatcgggcggtgatcctcaatgccgggattaaagtctccggcgatcgccacgaataccttattcctttcaatcaattactggcgattcactgtaagcgcggtctggtatggggcgagctggaatttgtactgccggacgaaaaagtggtgcgtctgcatggcaccgaatggggcgagacgcagcgtttttaccatcatcttgatgctcactggcggcggtggagtggcgagatgagcgaaattgcgtctggtgttttacgccagcaactggatttgattgccacgcgcactggggaaaataaatggctgacgcgtgagcaaacctctggcgtgcagcaacaaatccgccaggctttgtcggcgttgccgttgccggttaaccgactggaagaattcgataactgccgtgaggcgtggcgtaaatgtcaggcctggttgaaagatattgaaagcgctcggttgcagcataaccaggcgtataccgaagccatgcttaccgagtatgcggattttttccgccaggtcgagtcttcaccgctgaatccggcgcaggcccgggcagtcgttaatggcgagcattctctgttagtgctggcaggtgcaggaagcggaaaaacgtcggtgctggtggcccgtgcaggctggttgctggcgcgtggtgaagcgtcccctgagcaaattttattgctggcgtttggtcgcaaagccgctgaagagatggacgagcggattcgcgaacggctacataccgaagacattaccgcacgcacgtttcatgcgctggcgctgcatattattcagcagggcagcaaaaaagttccgatagtcagcaaactggaaaatgataccgctgcccgtcatgaactctttattgctgagtggcgcaagcaatgcagcgaaaagaaagcgcaggcgaagggctggcggcaatggctgacggaagaaatgcagtggtcagtgccagaaggtaacttctgggatgatgaaaaattacagcgtcgccttgcctctcgcctcgatcgctgggtaagtctgatgcggatgcacggtggtgcacaggcagaaatgattgccagtgcacccgaagagattcgcgatctgttcagtaaacgtatcaagttgatggccccgttattaaaagcctggaaaggtgcgctgaaggcagaaaacgctgtcgatttttcgggccttattcatcaggcgattgtgattctggagaaaggtcgctttatcagcccgtggaagcatattctggttgatgaatttcaggatatctcgccgcagcgggcagcgttgttagcggcattacgcaagcaaaacagtcagacgacgttgttcgctgttggtgatgactggcaggcgatttaccgattcagcggtgcgcaaatgtcgctcaccaccgctttccatgaaaactttggtgaaggcgaacgctgtgatttagacacgacttaccgttttaacagtcgtatcggtgaggtggcaaaccggtttattcagcagaacccaggccagctgaaaaagccgctaaacagcttaaccaatggagacaaaaaagccgtcacgttattggatgagagtcaacttgacgctttgctggataagctctctggttatgccaaaccggaagagcgcattctgatcctggcgcgttaccatcacatgaggcctgccagcctggaaaaagcggcaacacgctggccgaagttgcaaatcgactttatgaccattcatgccagcaaagggcaacaggcggattacgtcatcatcgttggcttgcaggagggaagtgatggttttccggctgcggcgcgggagtcgattatggaagaggcgctactgccaccggttgaggatttcccggacgctgaagaacggcggttaatgtacgtggcgctgacccgggcacgccatcgggtatgggcactgtttaacaaagagaatccctctccctttgtggaaatactgaaaaatctggatgtgccggtggcgagaaaaccgtaagaaacaggtggcgtttgccacctgtgcaatattacttcagacggtccgcgagataacgctgataatcggggatcagaatatcgaccgcgtcgttgaaatgcggcgactggattatgaagtctgccgttgccacgttggtggcgaccggaatgttccataccgtcgccagacgcagcaaggctttcacgtcaggatcgtgcggcacggcatttagtggatcccagaagaaaatcaatacatcaattttcccttctgagatcaatgcgccaacctgctggtcaccccccattgggccactcaacatcgcgttgacgttcatgccggtcgcgcgggaaattaagttaccggtagtgcctgttgcatacagtacgtgttgttccagtaacggttgatgccgttccacccagctcatcagcatttgtttgcagtgatcgtgtgccaccagcgcaatatgtttccgcgcaggtaaagtgcgagtcgtcagttccataatgtacatccgtagttaactttcctacagattactgtaagcacttatcgctgcaagataaagaccgaaaaagcctgcgcacaggcacaaaaatctcaggaagatggttgtttttccgcccactgcaggaaagtatttcgcgtttgtgggtcagccagtttaaaccaatacttcagccgttgttctgtgagcacctgagactgcggtggaatagcatccagctcggaaacacccgaaagcagcgtactgtcatctgccatcatcgtggcaaattgcggtagtgaagcgcgtttcgcggatttgttatagcgttcaacctcgacctcataatcaatcgtttttgccgttgaggtaatggcgagaatatccagctttaccggaatcggcgtcgcatcgccatccaacaattcaaggcgcggcgcggcatcaaaatggttagcttcccgctcattctccaggcgaggcaggcgaaaattgacctggttgatgagctgggtattaaaactgaccaccagcggtggggagatatacagccgttcttcactattggaaagatgaatcgtcttctcaacgcgaaacactaactgatgcggtccattatccagttcaatgctgtccgcaccgcgcagcagagagctggaaaccttcttgccgtcgagtaccagaagatcgacatcggttgaaagccgcagcgtggtggcaaaaacggataccggcaaacataatgcaatcaaggtggtcacgatgccggttttcataggtagctcctgtcaaaagaccgcccgaataataatgtgtcaaaatttttctttaatcatacttactaacatatagacatatttcccgcttttgctctcattcattcgtattagctgcatggttggcatgtcggctttgtcgtacactttgttaaacagtctggaggaaataatgaaagaaaccgatattgcaggcattttaacgtccactcacaccattgcgctggtgggggcaagcgacaaacccgatcgtcccagctatcgcgtgatgaaatatctactcgaccaggggtatcacgtcattccggtttcgccaaaagttgccggcaaaacgctgctgggccagaaggggtatggcacgctggcagacattccggaaaaagtcgatatggtcgatgttttccgtaattcagaagcggcgtggggcgtggcacaggaagctattgccattggcgcgaaaaccctctggatgcaactgggggtgattaatgagcaagcggcagtactggcacgggatgccgggttaaatgtggtgatggatcgctgcccggctattgagatccctcgcctgggcctggccaaataaaaaatccccggaaggcaaaaaccttccggggatttgttcagggattagttacgcagacgcggggcctggagttgtttgcggatggtctgcgccagctcatccatggatggctgttcaggatgttcatcctgcaattcgctacttagctgggcttcagccaggtaggtatgaaccggtaggccgttatcgtcctccatcactacgtgataccacggagcggcgcgaagctcgtcattcaccgccagctcatcaggcgacggttcagagagcgaataaaccgggtcgatatccacgaccactccgagataacctaacagggaatggcggacctgctggccgataccgaatttgctggcaatcatagtcacctcccgggaaatctttacctttgatataagggtaaaattccacatttcaagttacatgacgcgacaggcaaaccctttcagatatagcccttccggataggtagcgatcaccggatgatcggctgcctgacggaactgctctataaattgtacatcacgaccggcatcaattgcggcatccgcgatgattttctgaaataaatcgctggtcatcagaccggaacaggagaaagtcaggagaataccgccttcattcagcagctgaatcgccagcatgttgatgtctttataaccacgacacgcgcccatcaactggcttttattctcaacaaacttcggcgggtccatcacgataacgtcaaatttttcaccgcgatcgcgataagtacgcagcaatttaaagacatcatcacggacaaactcagccttgctcagatccagtttgttcagctcaacgttctgccgtgcaatatccagcgcttcctgggaggtatcaacgctgacaacctggctgcaaccgcccatcagtgccgatacggcgaaaccaccggtataggagaaacagttcagcacacgtttattttcaacgtagcggcgggtagccaggcggctatcacgctggtccaggtagtagcccgttttgtgtccgtgctgaatatccaccagcagtttcattccgtgttcttcaatcggcagcagggcaggtggcaactcgccggtgacggggccctgggtcagctccattccttcttttttacgtaccgcgacgtcgctgcgatcgtaaatcgaacattccgggtacagcgtttgcagggcactaattaatgccgcgcgctgatattctgccccagcactcagcagttgcagcaccagaaaattaccgaaacgatcgatagtaatacccggcaggccatcagattctccggcgattaaacgatagctgtcgaggccatctttttgcgccagccagtcacgccatttttgtgcttgttgcaaacggcgggaaaaaaaagcaatgtcgatagactcagacgggtcaaacgtccagacgcgcgcccggatttgcgaagctggcgaataagcgccgcgtgctaaccattttccctgatgatcaacaatatcgatggtttcaccgaggctggctttaccttccatgcgggcaacggccccggaaaagacccacggatggcgacgaagtaatgatttttcgcgccctttggctaacactaaacgtacactcataatttacttttctgtcgatgcaaagaaatgggcgtcattgtccggagttttccatggatttgcaacgcgtccattaaggataaggagagcagcaatgtcgaaagtctgcataattgcctgggtttacgggcgagttcagggcgtaggatttcgctacaccacacagtacgaagcgaaaagactgggtttaaccgggtacgccaaaaatcttgacgatggcagcgtggaagtggttgcttgcggtgaagaagggcaggtggaaaaattaatgcagtggttaaagagtggcggcccgcgttctgcgcgtgtagaacgggtgctcagcgagccgcatcatccctcgggggaattaaccgattttcgtatccgttaaatacattttaccggttttggcaggccagcaattttggtggcttgcttagccggacctttcggaaacagtcggtataaatagcggctgttacctttttcttcgccaaatttattcgccatcgcttttaccagcatacgaatcgccggagaagtattgaattccagatagaaatcacgcacaaaacgcaccacttcccagtgttccggtgacagcgaaatcccttcgttctctgcaatcaccacagccagcggctcactccactggctgctttctttgagatagccttcggtatccgtttctatctctttaccttcgaagatcagcataattattactaccttaatcagactggcggcagtgtaacaaaaaacaaagccccgcataaagcgaggctatgaaagtgttagcgggtgagattaatcgcggctagcgaagcccagaatgctcagcaggctgacgaagatgttgtacagcgaaacatacaggctaaccgtggcacgaatatagttcgtctcaccgccatgaatgatgttgctggtttcaaacaagatagcgccagaggagatcagaatgaagaccgcgctgatcgccagatgcagagcaggcagctgcaggaagatattcgcaaccataccaatcagcaccaccacaatacccgccatcagcataccgccgaggaacgacatatctttgcgggtggtcagcacatatgcagagcagcagaagaacactaacgccgttccgcccagtgccatagcgattacgtcacccattccggcagacagataggtgttcagaataggtccgaggatataacccagaaaaccggtaaaggcgaatgcggagataatcccggtcggcttattcgccgttttataggtcaggaacatcaaaccatacatacccaccagcgtcagaatcagacccggagatggcagcatcagcaccgtactggcagttgcggtaatcgccgaaaaggccagcgtcaggctcagcagaaaataggtattacgcagcaccttatgggtgctaagcagtgatgtacggtcatgtgaagaactaacaatacgatccattgagtcactctctatgacagatgtaattaattaagcagcataatgataatgcgtaagggcacccagaagttttacccatctttacgcatttgatctggaacaggtttaacagcggattatcaggtcattaagcaaatataacgccctgagaatttcgacaggcaaaagaaaaaggggttagcatttagctaaccccttatcttatttggcggaagcgcagagattcgaactctggaaccctttcgggtcgccggttttcaagaccggtgccttcaaccgctcggccacacttccggaatgacgcgcactataaacatcccgatgcggcgtgtaaacccctaatttgtttgtttgcctgaaaaacagccaaaagtgcattgatagcgtgaaataacagcagattgatcatttcatcaccatgaattccttctcttttactcgtttagcaaccggctaaacatccccaccgcccggccaaaagaaaaataggtccatttttatcgctaaaagataaatccacacagtttgtattgttttgtgcaaaagtttcactacgctttattaacaatactttctggcgacgtgcgccagtgcagaaggatgagctttcgttttcagcatctcacgtgaagcgatggtttgccttgctacagggacgtcgcttgccgaccataagcgcccggtgtcctgccggtgtcgcaaggaggagagacgtgcgatatgaataacgaggaaacattttaccaggccatgcggcgtcagggcgttacccggcgcagctttctcaaatattgtagtctggctgccacgtcgctgggattaggcgcgggaatggcaccaaagattgcctgggcgctggagaacaaaccgcgcattccggtggtatggatccacggtctggaatgcacctgctgtaccgaatcttttatccgctccgctcacccactggcgaaggacgtcatcctttccctgatttccctcgattacgacgatactttgatggctgccgccggaacccaggcggaagaagtctttgaagacatcatcacgcaatacaatggcaaatatatcctcgcagtagaaggtaatccgccgctgggcgagcaggggatgttctgtatcagcagcggtcgaccgtttattgagaaactcaaacgtgccgctgccggagccagcgcgattatcgcctggggaacctgcgcgtcctggggctgcgtgcaggccgcgcgacccaatccgacgcaggcaacgcctatcgacaaagtcatcaccgacaaacccattatcaaagtacctggctgcccgccgatcccggatgtgatgagcgccatcattacttacatggtgacctttgatcgcttgccagatgtcgacagaatgggccgtccgctgatgttctatggtcagcgaatccacgataaatgctatcgccgcgcccacttcgacgccggagagttcgtccagagttgggatgatgacgctgcccgcaaaggttactgcctgtacaaaatgggctgcaaagggcctaccacctataacgcctgttcctccacacgctggaatgatggcgtttctttcccaatccagtctggtcacggctgcctgggctgtgcggaaaatggtttctgggatcgcggttcgttctacagccgcgtggtcgatattccgcaaatgggtactcattccaccgccgataccgtcggtttaaccgcgcttggcgtggtggcagcggctgttggtgtgcacgcagtcgccagcgccgttgaccagcgcagacgtcataaccagcaacctacagaaaccgaacatcagccaggcaatgaggataaacaggcatgagcactcagtacgaaactcagggatacaccatcaataatgccggacgccgcctggtggtcgacccgattacgcgcatcgaaggccacatgcgctgcgaagtgaatattaacgatcagaatgtgatcaccaatgccgtctcctgcggcaccatgtttcgcgggctggagatcatcctacaagggcgcgacccgcgcgatgcgtgggcgttcgttgaacgtatctgcggcgtctgtactggcgtacacgccctggcttcggtttacgccatcgaagatgctatcggtattaaagtgccggacaacgccaatatcatccgcaacattatgctggcaacgctctggtgccacgatcatctggtgcacttctatcagcttgccgggatggactggatcgatgtgttagatgcgctgaaagccgacccgcggaaaacctccgaactggcgcaaagtctctcctcttggccgaaatcatcccctggctatttcttcgacgtacaaaaccgcctgaaaaaatttgttgaaggcgggcagttggggatcttccgcaatggctactgggggcacccgcagtacaaactgccgccagaagctaacctgatgggctttgcccactatctcgaagctctcgatttccagcgtgaaattgtcaaaatccacgcggtctttggcggtaaaaacccgcatccaaactggattgtcggcgggatgccttgcgccatcaacattgacgaaagcggcgcggtcggggcagtcaatatggaacgcctgaacctggtgcagtcaattatcacccgcacggcggacttcattaacaacgtgatgatccccgacgccttagccatcggtcagttcaacaaaccgtggagcgaaatcggcactggtctttctgataaatgcgttctcagctacggcgcattcccggatattgccaacgactttggcgagaaaagtctgctgatgcctggcggcgcggtgattaacggcgacttcaacaatgtgctgccagtggatttggttgatccgcagcaggtgcaggagtttgtcgaccacgcctggtatcgatatcccaacgatcaggtcgggcgtcatccgttcgatggcatcaccgacccgtggtacaaccccggcgatgtcaaaggcagcgataccaacattcagcagctgaatgaacaggaacgctactcgtggatcaaagcgccacgctggcgcggtaacgcgatggaagtggggccgctggcgcgcacgttaatcgcttatcacaaaggcgatgctgcgaccgttgagtcggtcgatcgcatgatgtcggcgttgaacctgccgctttccggtatccagtcaacgttaggccgcattttgtgccgcgcgcacgaagcgcagtgggccgcaggtaagttgcagtatttcttcgacaagctgatgaccaacctgaaaaacggcaatctcgccactgcttccacggaaaaatgggaacctgcaacctggccgacagagtgccgtggtgtcggttttaccgaagcgccgcgcggggcgttaggccactgggccgccattcgcgatggcaagattgatctctaccagtgcgtggtgccgaccacctggaacgccagcccgcgcgatcccaaagggcagattggcgcttatgaagcggcgctgatgaacaccaaaatggcgatccccgagcaaccgctggagatcctgcgtactctgcacagctttgacccgtgcctcgcctgttcaacacacgtgctgggcgacgacggtagcgagctgatctccgtgcaggtgcgttaacagcgaaggagaatcatcatgcaacagaaaagcgacaacgttgtcagccactatgtctttgaagcgccagtgcgcatctggcactggttgacggtgttatgcatggcggtgttgatggtcaccggatactttatcggcaagccgctaccttccgtcagcggcgaggcgacgtatctgttctatatgggctacatcaggttaattcacttcagcgccgggatggtttttaccgtggttttgctgatgcggatctactgggcttttgttggcaatcgatactcccgcgagctgtttatcgtgccggtatggcgtaaaagctggtggcagggcgtgtggtatgaaatccgctggtatctgtttctggcaaaacgtccgagtgccgatataggccataatcccatcgcccaggcggcgatgttcggctatttcctgatgtcggtctttatgatcatcactggttttgcgctgtacagcgaacacagccagtacgctatttttgcgccgttccgttatgtggtggaatttttctactggacgggtggcaactcaatggacattcacagctggcatcggctggggatgtggctgattggcgcgtttgtgatcggtcatgtctacatggcgctgcgtgaagacatcatgtccgacgacacggtgatctccaccatggtcaacggctaccgtagccacaaatttggcaaaataagtaacaaggagcgttcatgagcgagcaacgcgtggtggtcatggggctgggcaacctgctgtgggccgatgaaggcttcggcgtgcgggtggcggaacggctgtatgcccattaccactggcccgagtatgtggagattgtcgatggcggtactcagggactgaacttgctggggtatgtcgaaagcgccagccatctgttgattctcgatgccattgactacgggctggaacctggaacgctgcgaacctatgccggagaacgcattccggcttatctcagcgcgaagaaaatgagcctgcatcagaacagtttctccgaagtgttggcgctggcggatatccgcggacatctgccagcacatattgccctcgtcggtctgcaacccgcaatgctcgacgactacggcggtagcctgagcgaactggcacgggagcaactgcccgctgcggaacaggcggcgctggcgcagcttgctgcgtggggaattgtgccgcaaccggctaatgaatcgcgctgtctcaattatgactgtctgtcgatggaaaattacgaaggcgttcgcttgcgccagtaccggatgacacaggaggagcagggatgagcaacgacacgccatttgatgcgttgtggcaacgaatgctggcgcgcggctggacgccagtcagtgaatcccgtcttgacgactggcttacgcaagcgccagacggcgtggtgttattaagcagtgacccgaaacgcacgccagaggtcagcgataatccggtaatgattggcgaattactgcgcgagtttcccgactatacatggcaggtggcgattgctgaccttgagcagagcgaagccatcggcgatcgctttggcgtctttcgctttcctgccactttagtgtttaccggcggaaactatcgcggcgtgctgaatggtattcacccgtgggcggaactgataaacctgatgcgcgggcttgtcgaaccgcagcaggagcgtgcctcatgagcgaaacttttttccatctgctggggccaggaacgcaaccgaacgatgacagtttcagcatgaatccactgccgatcacctgtcaggtgaatgatgaaccgagtatggcggccctggagcaatgtgctcacagcccgcaggtgattgcgctgttaaacgagttacaacatcaactaagcgaacgccaaccgccgttgggcgaggtgctggcagtcgatctgttaaatctcaacgccgacgatcgtcactttatcaatacgcttctcggggaaggggaagtgtcagtgcgcattcagcaggctgacgacagtgaaagtgaaatacaggaggcgatcttctgcggattatggcgggtgcgcagacgtcgcggcgaaaagttgctggaggacaaactggaggctggctgcgcgccgctggcgttgtggcaggcggcaacgcaaaatctcttgccgacagattcgctgttaccgccgcccattgatggcctgatgaatggcctaccgttggcgcatgagttactggcacatgtacgtaaccccgacgcgcagccgcacagcattaatctgacgcaattacccatcagcgaggctgatcggctttttctctcacgtctctgtgggccgggaaatattcagattcgtaccattggctatggcgagagctatatcaacgccacggggttacgccatgtctggcatttacgctgtacggacaccttaaaaggcccgttactggaaagttatgaaatctgcccaataccggaagtggtgctggcagcgccagaagatttggtcgactctgcgcagcggcttagcgaggtatgtcagtggctggcggaagctgcaccgacgtaaaaagacggtaagtatcgctttcagtcttatgaatatcgcaatcggcgaatacctctggtcgtagagtttcaggataaagagggagatctaccattatcgggttatttttctctcttcgcctacaggagtgcgcatgtgggatgtcattgatttatcgcgctggcagtttgctctgaccgcgctgtatcactttttatttgtaccccttaccctggggctgatttttttgctggctattatggaaaccatttacgtggtcaccggcaaaacaatctaccgcgatatgacgcgcttctggggtaagctcttcggtatcaattttgctcttggcgtggctaccggcctgaccatggagtttcagtttggtactaactggtcattctattccaactatgtgggcgatatttttggcgcaccgctggcgatggaagcattaatggccttcttcctcgaatccacctttgtcgggctgttcttcttcggctggcaacggctgaataaataccagcacctgctggtgacgtggctggtggcgttcggttcaaatctctctgcgttgtggatattgaatgccaacggttggatgcaatacccgaccggtgcgcattttgatatcgacaccctgcgtatggagatgaccagcttcagcgagctggtctttaatccggtcagccaggtgaaatttgtgcacaccgtaatggcgggctacgtgaccggggccatgtttattatggcgatcagcgcctggtatttactgcgcggacgggagcgcgatgtcgcattacgctcgtttgccatcggttccgtcttcggtactctggcgattatcggtaccctgcaactcggagacagttctgcgtatgaagtcgcgcaagtacaaccggtaaaactggcggcgatggaaggggagtggcaaacggaacctgcacctgcaccgttccatgtggttgcctggccggaacaggatcaagagcgtaacgcctttgccctcaaaattcccgcgctgctagggatcctcgccactcactcattagataaacccgtgccgggtctgaagaatttgatggctgaaacctacccacgcttgcaacgcggacgtatggcctggctgttaatgcaggaaatatcgcaaggcaatcgtgagccgcatgtgttgcaggcattccggggactggaaggtgacctgggctacggcatgttgctctcccgctatgcgccggatatgaatcatgtcacagccgcacagtaccaggcggcgatgcgtggcgcgatacctcaggttgcgccggtattctggagtttccgcatcatggtgggctgtggttccctgctgctactggtgatgctgattgcgcttgtccagacgctgcgtggcaaaatcgaccagcatcgctgggtgctgaaaatggcgctctggagtttgccgttgccgtggattgcgattgaagccgggtggtttatgaccgagtttggtcgtcagccgtgggcgatacaggacatcttaccgacatactccgcgcactccgctttaaccacaggacaactggctttctcactgatcatgatcgtagggctttacaccctgttcttaatcgccgaagtctacctgatgcagaaatatgcccgtctggggccgagcgcgatgcagagtgaacaaccgacgcagcaacaggggtaaaggagaaaatcatgtttgattatgaaacattgcgcttcatctggtggctgctgattggcgtgatcctggtggtctttatgatctccgacggatttgacatggggatcggctgtctgctgccgctggtggcgcgtaatgatgatgaacgccggatagtgataaacagcgttggtgcacactgggaaggcaaccaggtctggttgatcctcgctggtggggcattatttgccgcctggcccagagtgtatgcagcggcgttttccggcttttatgtggcgatgatcctggtgctgtgctcactgttcttccgcccgctggcctttgattatcgcggaaaaatcgccgatgcacgctggcgtaaaatgtgggacgccggtctggtcatcggcagtctggtgccgccggtagtcttcggtatcgccttcggcaacttgttgctcggcgtgccgtttgccttcacaccgcaattacgcgtggagtatctcggcagcttctggcaactgctgacgccattccctttattgtgcggattgctcagccttgggatggtgattttgcaaggtggcgtctggttacaactgaaaactgttggtgtgattcatctgcgttcacagctggcgaccaaacgcgctgcactgttggtgatgctgtgctttttgctggcgggttactggctgtgggtcggtattgatggctttgtactgctcgcccaggatgctaacggtccttccaatccgttaatgaaactggtggcagtgctacctggtgcctggatgaataattttgtcgagtcgcccgttttgtggatcttcccgctgctgggattcttctgcccattgctgacggtgatggcgatttatcgtggtcgcccgggttggggatttttgatggcatcattgatgcaatttggcgtgattttcacggcaggcatcacgctgttcccctttgtcatgccgtcaagcgtgagtccgatctccagcctgacgttgtgggacagtacttccagtcagctgacgctgagcattatgttggtaatcgtgctgatatttttgcccattgtgttgctctacactctctggagctactacaaaatgtgggggcgcatgacaacagaaactctccgccgtaacgaaaacgagttgtactaaggagcagaaacaatgtggtatttactttggttcgtcggcattttgttgatgtgttcgctctccacccttgtgttggtatggctggacccgcgtctgaaaagttaacgaacgtaggcctgatgcggcgcattagcatcgcatcaggcaatcaataatgtcagatatgaaaagcggaaacatatcgatgaaagcgatcttaatcccatttttatctcttctgattccgttaaccccgcaatctgcattcgctcagagtgagccggagctgaagctggaaagtgtggtgattgtcagtcgtcatggtgtgcgtgctccaaccaaggccacgcaactgatgcaggatgtcaccccagacgcatggccaacctggccggtaaaactgggttggctgacaccgcgcggtggtgagctaatcgcctatctcggacattaccaacgccagcgtctggtagccgacggattgctggcgaaaaagggctgcccgcagtctggtcaggtcgcgattattgctgatgtcgacgagcgtacccgtaaaacaggcgaagccttcgccgccgggctggcacctgactgtgcaataaccgtacatacccaggcagatacgtccagtcccgatccgttatttaatcctctaaaaactggcgtttgccaactggataacgcgaacgtgactgacgcgatcctcagcagggcaggagggtcaattgctgactttaccgggcatcggcaaacggcgtttcgcgaactggaacgggtgcttaattttccgcaatcaaacttgtgccttaaacgtgagaaacaggacgaaagctgttcattaacgcaggcattaccatcggaactcaaggtgagcgccgacaatgtctcattaaccggtgcggtaagcctcgcatcaatgctgacggagatatttctcctgcaacaagcacagggaatgccggagccggggtggggaaggatcaccgattcacaccagtggaacaccttgctaagtttgcataacgcgcaattttatttgctacaacgcacgccagaggttgcccgcagccgcgccaccccgttattagatttgatcaagacagcgttgacgccccatccaccgcaaaaacaggcgtatggtgtgacattacccacttcagtgctgtttatcgccggacacgatactaatctggcaaatctcggcggcgcactggagctcaactggacgcttcccggtcagccggataacacgccgccaggtggtgaactggtgtttgaacgctggcgtcggctaagcgataacagccagtggattcaggtttcgctggtcttccagactttacagcagatgcgtgataaaacgccgctgtcattaaatacgccgcccggagaggtgaaactgaccctggcaggatgtgaagagcgaaatgcgcagggcatgtgttcgttggcaggttttacgcaaatcgtgaatgaagcacgcataccggcgtgcagtttgtaatgcataaaaaagagcattcagttacctgaatgctctgaggctgatgacaaacgaagaactgtctaatgcgtagaccggaaaaggcgttcacgccgcatccggccactttcagttttactctttctcggagtaactataaccgtaatagttatagccgtaactgtaagcggtgctggcgcgtttaatcacaccattgaggatagcgcctttaatattgacgcctgcctgttccagacgctgcattgacaaactcacctctttggcggtgttcaagccaaaacgcgcaaccagcaggctggtgccaacagaacgccccacgaccgcggcatcactcaccgccagcatcggcggcgcatcgacaatcaccagatcgtaatggtcgttcgcccattccagtaattgacgcatccgatcgcgcatcagcagttcagacgggttaggtggcacctgaccgcgagtaatcacatcaaagcctcctttgccaaaatgctggatcactttgttgagctcatctttacctgccagatattccgacaagccatgttcattactcacggtaaacaggttatgcgaataaccacggcgtaagtcggcatcaataaataacactttttgatcggactgggcgatcaccgctgccagagttgaactgacaaacgttttaccactgtctggcgtcgcaccggtgatcattagaatgttattctccgtctccatcatagcgaaatgcagactggttcgtagcgcacgtacggcttccacagcagaatccgccgggttatccaccgccaggaaggggatatttttagtacgatggcgctgctgattagaaaataaatttttcttacgcagacgggtgcgtttatccagccactcggacattgggatagtggcataaacgctgatgccgtgctcttccagttgttccggggcttctacaccacgacgcaacatcgcacgcgccagcacggcacccacagaaataaacaggccaagaataaaaccaagcaccacgttcaacgcttttttcggtttcactggctgcggctgagtgactgccgggtcgataatccgcacgttaccaatggcactggatttcgaaatactcaactcctgctggcggttaagtaattgcagatataccgcacggcccgcttctacgtcacgacttaaacgcaacacttcctgttgggtggaaggcattgccgatacccgcttattcaggcgtttgcgttcttgctccagcgtctggcgtttttccagcagcgcacgataagttgggtgatctttcttatacagctgggagatctctgcctcgcggaaggtcagctcattgagttgattatcaacgttcacaatctgctcaagaacggctttggcttccaggttaaggtcaaccgaatcgcgctgctggcgataaacgttgagtttttcttccgcctggtccagctcgctgcgcacttcaggtaactggcgctgtaagaattcaaggctttgtgaatcctgcgccgcctggcgagcgatattctgttgcaaatagttgttagcgatgctgttcagaatacgagtaatcaactggggatcatcaccagtcatggtaagttccagcatcccgctttctttactgcgttcgctaacggtaaaggtttcctgcaatgcgttaatcgcttccagttcggtacgctggctcaggacaaactgtgttcctggtttggccttaatgtccgcgatagtcagcgcaacgccatctttttccagacgctggccgaccataccattgacggtgaactcttcaccttccagtgtatagtggccgttttccccaaccgtgagtgtcagttgctgatcctgaccattcagttgtggaatatgcatccagctgatcgccagctcacctggtttttctttggttaatctcgcccagccgcgacccacaatcggaaaatacttctgctcaactatgtcgcgcagattcagttcagcaatggttttaccgagaatcatgcgcgattgcagcagttggatctccggtgcagactcgggcgatgagttagggatcatatcgctcaggccgctgagaatggcgttgccctgtttttgctcaacctggaccagagtatctgcctgataaattggtgtgcttaacagcgagtaagcgacagcgatcagcgtgaataacgcggtcacgctgataataaacttacggtgatcccataactcgccgaccagacgaagcagatcgatctcattttcctgagtgctgcctggtggcgtattcatatttttagttgtcatcgtattttataaactcaaattaccggctgaggcgcttcgcccattcctgactggcgcgctccaacataccgtagacatgttcaaatgcgtcctgacttttacgatagggatccgggatctctttctgttccagccattgcccaaacagcattgtcttcccgcggacctcgggagcaattgcggtaacctgagcaatatgttccgactccattgccagaatcagatcgtaatttcgtgccatctcagcagtgagcttacgtccggcatgtccttcaagagatacgccatgattagcggcaacatctgccgctgtcgcatctgcagggtgttttaccagaccatgaacacctgccgatttgacttttacgcccggcagacgtttacgcagcaagcgctcgccaatgggcgaacggcaaatgttgccggtacaaaccaccaggattgagttaaattttagttgggccatgtttgaatccaccgtgaagtctctgtcaggtcatgcaccccggaaatcgtcggtaccagcagagaaatcacacggttccaacgagccagcggcgcggtagtgacataaacaatgtcgtaaggttcaagctggaattccgttccgagtatcattgccgatgcgtccttcgcattcagctgataaatattggcgattttgccattctgcttgttttgcgttgcacgaataacaaaaatccccgtcgcatcagcgacatcctgattcataccctcagcgttacccagcgcttccgccagggtcataccgctgcggtccattttcagcgtgctctgtttacccacttcacccatcacgaagactttcagatcatcgttgcgcggaataaataaaatatcgcccgggtgcagcagtttgttctggcgcaagtcgccacgctgcatcagcgcatagaggttcactttggtctttacgccattctgggtgagcaccacgttgcgccagtctgcatctgcggtcagaccgcccgcggcgttaatcgcatccatgatggtcagaggaatattggtaatcggctgctgacccgatttgctgacttcgccggtgacgtacgctttttgcgatcggaacgccgcgacgctgacatcgacttgcgggctttcaatgactgaatcgagacgcgctgtaatctcgttgcgtacctgggtaagtgttttcccggccactttcaggcgaccaatataggggtagaaaatcgcaccatcggcgttaacccagttgccggtatcactggcgctacggtattgccctgcgggggtggttagttccgggtgatcccagaccgtaaccatcaacacatcaccaatcccgatacgatattcatagtttgcgatttgctgctccagctccgggttagcctgcgacataatcggtttggcgcgcaactgatcaatcaatcctggcgtgacgggatagatattgaccattttgtccaggtcatactgattgtcaggtagttcaatgacatccttgttactggtcgataaattctgaccaggaacaagggtacatgctgtcaaagacagaacagccaatgtcagtaccgaaaacttaaaaatgttctttttcattggtttatatttatcagtcaatgtaatgttatgaattacgtcaggttattgtccaaccggtacttctcgctctgccgtcattggatagagctggtatttgcgtgacagcatttgtccaccatcacgcgtcaatggtgtccacgaaaccaccgcgcggttgcggttaggtccaatggtcatcaagtcgaatggaatcgagatataaaaacctttactaaagccgccttcgccgtagtcatctttagatacgttactgattgccgcccatacccctaccgccacgccgctgtcaaagcgtttggcgacgtcgatcgttgcgcctttatcttttgccagatattgcccaacgctaagtttcatcagtacgccattgagcgtcggcgggttccagtaagccgtcacgaaacctgttggcgtggaataatcggtgaaacgcatcatgttgtcccagtcacgttgcttcacgtagttaacgtccacacccagcgcccagcaggcatctagcgggcgataaagcagctcggaaccgacaccggcgtacatcgtttccagataaccgccatacacctggccatagaaaccattgcctaagtcagcaaaatagttcgcctgcaagttgttgagataaacgtcattgcgaacgtagtcacggatatgcgtgcgcacgcggggcagggtagagtccgcgggcaacagcgaagacttaaacttgtcgtagttgttgtaaatattggtgaaaataccgccatcaagcagcaggtggtcggtaaaccagtagcgggcactggacatcagccccagctggaacatatagaaatcttccgggccgcccagcgactgtgaaagtgttgggttgaaagagtagctaaagcgatcttcacgaatacggtagccccgaccaaaggcagaaagatcttcagcttcaacacgttgttgttgcagtggctctgattgaccaggcgctgtacctgccagctgtttgcgcaggctggctacgtcggtttcggtagtcaccatcgccatatgctcgcgcttttgcgtcacgctaatcttctcaacgccttgcggcaggttattcaccagaatccggttggcacgatcgaccgcttcacgagagtcacggtatttgtattgctgaccagacatatacagtgtcttatcgcgtagctgaatttctggcgcgtcaaagcccgcgttatacttcagggcggtaagttggtttgctaccgtggtgtactgcaatccttcagattcaggcgcaggttgatatgccggttttggcgtatcgcgcagggcagggcgcagatcgttgaaattggtccgtaacgtgaagccaaacatcaacgtgttaccgcgttcataactcaggttgagatctgcccagctggcagcgcgataaactgcgccgacgttgaaatggcttgcctgaggcagtttgccagcgaaatcattctggtaattgtttccatcgtattcgagtttcagacgcaggggattccacggcgtttgatactcaatgccgccaaagatggaagccgggccacgaaagatatcgctaaagctgatatcgcccgcatcgtgagactctgcgcgatgacaatatttatcgctcacccggcaaaacgggttggtaatattgcccgcattaccggcgtagccccatgccatcccgagggtgaaatcaaatggccccgcttgcttgctggccaccagatactcaccgtcaaacagacccgtaccagcaatatcacgtttaccaaacgccacttgcggtagccagtaaccttcttcccacaggcgaagtttaaaatcgaatgatttgtctttgtatgactgatcgccgctgaaatcttcccactggctatatttgcgtgtgcgcacatccgtataacgaatggtgccttccagccatgggaacagcgccacggaggtggagtagaaccggtattgatcgttatcccggtagttgacgctgaattcaccttccggtgcgatgcgcgcatttggcatctgcaacaatcctgtgccgccaaagtctgattgcgacgaacccagcggatccgggtaggttaatacttcagcatgacaggcactggagacggcaatggccaggcagcttaaaagataagaattcttcttcatcagtcaggaacacgttgcgttaaaacagacacaatctggtcatttaaatcagcatatttttcgggcagtacatgcgcagaaaagcccaaccaaagctggctgccaggcggtggttccacatgtcttttattccacagggcaacaggggcgacgacagtctcaccctcaggcgtaatcaccataacgttattcttgtccgcgcctgcaaggcgggggtgatcttgcagataatcggtaacgctacggcctgcctgccagggcaattgcccggccccagaaaccgcacccagcagagtaatagtcaccggacgctgtacggtatagagcgtatagtccccgaccaacgggggattgctgttctcatccactcgtacaaaatcagggtccagtttgaccggtaagcgaccagtgatattgagattgagtaactgctggcgcacggatttaatcgttgccgccacatcgtcgtcagcttctgcttcccaggaagcaagctgtgccatgacatgttggtagtctttaagcgctttagctttcgccgcagagtcggtcagcaaggcaccaggccaccagaggcgatcgcgcagttgcggttgtgtcaccaactggacaacattttccacggggccaacggaaagtgtctgttgttcgccaggcagataaatagtcaccgttccttgcgcaaaggcatggggtgtcattacgtaaagtacgctggcaatgaaatacgactgtaatttattcatggtgcgggtttaagaaacgtcatttctacgggaataacccctgcgcctaacatttgccgactttgacgaacctggccagtagccgaatcgacccagaatgtgttttgccactgtttttctggccgcgtggaagtcacctcttcctgccagacattacacagcacattgcgacccgcaatattcagcgtctctaatccagcaaaggaaaaagtagaactcagggtcgcagagcgaaaatggttgtcttcactccagagaatatcgcgcgtccagcggctgccatcttttattgccagcgcgttacgcagagggtcctgcccggaatttgtcacttccagcagattattattaagtttgacggtttttaaaagacgtccattgtgggtaaccagcatggcgttatcctgggataaccatttgctttgttcttgttctatatatcccagtaccacaaagattcgttgcccttcattaaggcgtaaatacatagtggaataaggcaacgcctggatctgctgatccgctacggtgatatcctgattatcgaaaaggctggcgcgaaatgtatcgaccatactttgctggctgtgcgtacatcccgcaagaaatagtgcgaaaatcgataaaataagagggcgcacctttaatccttgaaaggttaattaaaaaaatgcaaatctctaaagcccggtacgaatatcgcaaccgggtatcatttaactttaatttcgacgcgttaaagcagtattagcgtgtagtggacgtggtggttgaggtgttatgagaaccgccatcgccactgtcatttgctgcaacaactgccaacgtcgccacaccaacagccgttgccacaccgacaactgtcgccgtgccgacagcgccagcagccacgccaccagtggtagtagcagtcgtggttgcgccggtagtggtcgttgtggtgccagtagtatccgtcgttgcctcggtcccgtttgttgcttcaggggcagcaaacgcagctggcgtcgtcaacatgaaggccataaggattgcagaaagcttgtgtttcataacttttcctttattcatcgcatggacaatacgtacgcttgagatcaggattgtctactttgagtataacatccttgtgaaatctccctttcctcataccgcttgcactatatactgcgggtaggaaaggcgcgcagagggaaatataagattgttaactatccccctctggaaatacgacttgtgagcataagataaatcttagcaaaatacaaattaaagataaggaaattgttacgaagctattaattattgttggtaatatagtttcaagtggtactataactggctgttaaatggcatttataactattaggtgcagagatattcgcttaaatggattagtttctttgtggaaaagtaactgatgttataatgtatgatgttgactattgcactattccaataaaaccagtcagctttaaacaagcagcgtcatattaagagagataaacatttgccgctgttggtcctcgcaggccatttacgcggcaaaattccacacgtaatcctggtataagcacttctgcgtcgcggggagtgaatgcggaaatatggacctgaacttctttacgaccgtcggaggggataatgaatcctttgccgcttttgcgatcaaaggttttgacaattcctgtcattttacgggacaaacaaattccttactgaaaatactgcgctgcagtatacggggttaataaaataaagccagcgatatttaagaccgccggacggctaaaataaaatttgcttaatctcaattatcatgcgttaatagctgcgtcggtttgaaagacagacagcatacaaagtagtttactaaagcagttctcattatcaggcattatccccttcttttgagtctctctcctgaacactaagtagtttctgtattaaagccctgtttgccgaaaggcccaaaatgaaggaagtaaaatatgtctaataaaatgactggtttagtaaaatggtttaacgcagataaaggttttggctttatcactcctgatgatggcagcaaagacgttttcgtccatttcaccgccatccagagcaatgaattccgcacgctgaacgaaaatcagaaagttgaattttctattgagcaggggcaacgtggccccgcggcagcgaacgttgttacgctctaaggttgccattattactcaacatctccatttccgctgtccatgttgtcatggttcacagtaccgcacatcggcattcgatgtgacggagcgaaaccctttgggcgctaagtgtattttttgtaaatcgacgatgatcacctttgataacgtcgcgctgcaaatacgcactgaccatgcgccgctggatttcacaaaataatatcaggctccctcgtggagccttttttatatctgccttatttttcttcaacgctgtatgtatagtaagcgataacctgttgattattgaatctttcggggagatggcttataacatttcttacctgaccagggtaccgggaaccaacaccttactggcgtgttgctgtcttttaagaccagaagaggttaacagtgaatattgaagagttaaaaaaacaagccgaaacggaaatcgccgactttatcgcgcaaaaaatcgccgagctgaacaagaatacagggaaagaagtctctgaaattcgcttcaccgcacgagaaaaaatgaccgggcttgaaagttatgatgtcaaaatcaaaataatgtgattttgtgaacatcaccccgtgcgaggtgatgttccgcttgttgctaatttagtgaccaatcattggcgcttgtggaattaagcgtcggtacaattcctccggcaccgggctttgccatactcccgcatacattgcgtaaccaatcaccgcaaacataatccccagaaccagtagcgtcattaaccagccagacaacgcaaaggcttttttatttgccgcaggtttttgcagtgaaaaggtcaatgttgaggctaccggacatgactctacgcaagtcatacagccggtacattccactgttcgtacctgaattaatttatcgaccgggatccgtgatgggcaattttttgcgcatttgccacagtcgatacaactttcggcattgcgacgaatcttaaacggcgacaatagcgaaaccacgcccatcagcgcgccatatgggcaaagataacgacaccaggcatggcgaataaacaggctggcaatcagcaaaacggtcacgctgattaatgtcgcggtccccatatgacgaaagaaatcgagcattttaacgtccatcaccacgctgtagggcgacaacataaaatagtgaatcgcctgagcgggcatcaataacgcgatatagataaaaaaactcaacagcaaatacttcacgccgcgcagaggaatatccagccagcggggaaggacacattgccgaccaaacagtttgttaccgagatcgccgattaattcagaaagcgtaccaaccgggcataaccatgagcaaaaggcctttttgagtaatagactgatgacgataaaagcgaccaataacagcatcgcggcggcgtggacggacggtaactgacctgttacaaggctatatttcagattcatcagcccggcaatcggtagccagccttcgatacctcccggtctggcgacaaatgtcgtgctacttgccgtttcgtaatagcgcacccaataccagaacgtgatggcaatataaatattcattgccaacagtaataattgcgtcgctttacgccaggtcgtggcattacgccagtcattccacggtaatttgccgcccgtcgtgcctggccgccgctgccagcgggttcttttattctctgccatgattttgccagtccgttaagttgtataccaaatgccactattctagttgttcttaactggctgatattgattcaaatcgcgttcaggtctttcttatgcaaccatgcttccagagcggcaacactgcgtgtaatttcttcgtgtggaaggggggcagataatggctgctgctccagttgtgcgcatagctggctggcgatatgcattcccagactcgagcaactgctttttagctgatgcgcggcacgctttattttctcgctatcctgactggcgcgggcaatgtcgatttcatcgagaagcggcagggcatgttgtgtaaataataccagccattcgtggatcttctccgtccccattaactgagcatcttcattgagttgcgatacatccagcgattgatcattattgacttgcagttggagatagtgcgccagtaactgaccgagcacttcacgcggcaccggtttagggataatcccgcggaataatgaactggtacgctggcgcagcgtttcgtcaatgacatgggcgctaaagccaatcaaaaccagcgacggatattgctgtgccagttgtcgggcaagcgtaatgccgtcgatatccggcagatcaaaatccaccagtgcggcagcaaacggttcgctattttgcagtgtctctaaagcctgcgcggcattgccaacagcaacaatctgcgcaccactggttttcagcatctcaatggtaattcgctgggttagcgggttatcttcaattaacagcaaacgtaaaccgtcaagacgcaccgcctgattgactgtttttggcacgggtgccgtggcaacacgtaacggcaagcgtaaacaaaaacagcttccaacctccggcgtgctggtggcgctcagttcgccgcccatcgcctgggccagacggctactgatagtcagtcccagcccggtgccgccgcgtttgccgcttacctgcacaaatggctggaagatttctgccagtttcgcgggatcaataccgcagccgctgtcttccacttcgaccagccattgctcgccatcagtgcgactacgcaggataatgtacccttcgtcagtaaaacgcagggcgttgctcaacaggttggttataacctgacgaatacgtcgtggatcgcccattaacgcgcacggcatatcatcagcaattgccgttgccaggcgaatcgggcgacctttcacccgtccgctcattaattgcagggtactttccagcagcgggcgcggttcaaagggctcatcgctgaccgaaacattcttgccacctgcttcgatagcggaataatcgagaatatcgttgaggatggtcagcaacgattcaccagagtcagtaattgcccgcaaatcatcacgctgggcgttaagtgcggggttatctgccagcagttgagcagtgccgagaataccgtacagcggtgtgcggatctcatggctcatcgccgccagaaacgccgattttgcctggctggctttttctgcttccgcccgtgcctgtcggtgttctatcaccagttcctgcaattcagctgtacgcgctttgacctgcgccgccagctgttcgcggtggcgattcagtgcatgaacattgctgcgaaacgcatccatcagccgcccgatggtatccagctcccgtacgccagcggtttccgggaaaggggagtcaatatcaccgtccagcagccgttgcagcgcctgcgtttgttcggcaagtggacgcgtgactgagcgataaaccacgcgccagaggatcagaatcagtgcgcaaagtgaaaccatccccagcaataacaggctgtattgcccgcgtgcactcgctttttccagatgcgccagtccgtgctgattacgcagctcaatggtgtcgaccagctgactgacttcgctactaaactgcgcgaactgggcgatgttattttgtgcgagagtttgtaggtgattgctgatttcactgtcctgctgatacagcgccagcaaatcgctatattggctaacggtagttaacgttgttgcgacctgcgcacgaacacccggatcttcaatgcgtatttgccgacgttgcagaattttcaccgcattattgagctgcttttccagcgttggtgcatttttctggatctgctccagccccagattcatcaccatttgctgcacccgcagagcgctaaggcgcagttcattcatctggttaacatactcaagatcgatatcaatcagccgatcgagtgcactttcagcagcctgacgctgatcttgttcgatcaaatcgtaaatcccggcctgggtcgctccagcggaagttgtcgcattattcgcctgaccttgcgccaggcgtgcgatctcatcggcggcagcgactatctgctgactgagttgctgttgttgctggcgcagttgcaaacgctgccccaccagttccccttgctgacgtaacgaacgggagatctcctgctcctgttgttcaatagcggtggtatcaaaaccttgttcccgtaacgcttgcagcaacgcattaatcttcaggctttgtgcggtgagcattcgcccctgcgcctgccacatcttttcgttatcggcactggtcaggttctgcgcggcgaaaagttcccaggcgctggcttcgctcaactggcgcgccatattcatggtaggaatcaatgcctgagtgttgtctttttccacctggctgataaagcgcaggttgtaccatcccaccagggtactggtcagggttaacagcgccatcagggcaaagcccatccagagtcttcgggtcagggttaaattcacggtcggtgcactttaggtgaaaaaggttgagtcgcaaagcggaatgcatctagcataaagccttattattgatgaggctatcatgcgcgtactgctatttttacttctttcccttttcatgttgccggcattttcggctgataacctgttgcgctggcatgatgcgcagcatttcacggtgcaagcctctacgccgtttaaagccaaacgcgcatggaaactgtgcgcgctttatcccagcctgaaagattcatattggttatcgttgaactatggtatgcaggaggctgctcgccgctacggtgtggatttaaaagtgctggaggcaggcggctacagccagttggctacccagcaagcacaaatcgaccagtgtaaacagtggggcgcagaggccattttgctcggtagtagcacgacctcatttcccgacctgcaaaagcaggtagcaagtctgccggtgatcgaactggtaaatgctattgatgctccccaggtgaaaagccgcgttggtgtgccctggtttcagatgggctatcaaccggggcgatatctggtgcaatgggcgcacggtaaaccactgaatgtgctgttgatgcccggacccgataacgccgggggcagtaaggagatggtcgagggttttcgcgcagccattgccggaagcccggtgcgtattgttgatattgcgcttggtgataacgatattgaaatccagcgtaacctgttgcaggagatgctggaacgccatccagaaatcgacgtcgttgccggaacggccattgcggcagaggcggcaatgggggaagggcgtaacctgaaaacgccgcttaccgtggtgtcgttttatctttcacatcaggtgtatcgcgggctgaagcggggaagagtgattatggctgccagcgatcaaatggtctggcagggggaactggcggttgagcaggccatcaggcaattacaggggcaatcggtttctgataatgtcagcccaccgattttagttctgacgccgaaaaatgccgaccgtgaacatattcgccgctcgctgtcaccagggggatttcgtccggtctatttttatcagcacacatcagcggctaagaaataaccttcaccatgttgcgtcaccagtaaatccgcgctgagtttatgacgtaaacgacgaattaacacatcgacggtgcgcaggtcagggttttccacccgacgcgcagaaagcatacgtagcagacgttcacggctgagaatttcgcccggattcgtcacaaatgccaccaacatttcatactctgcgcgggtcagtttaatcggctcgccatcccgctccagcgtatggcgcgacacattcaggcaataaccggcaaagcgatagcagttgtcctgagtgtgcggttgagcttgtcgcgcgaggtcgattcgccagagcagatttttcacccgtactaccagttcgcgcagttccagcggtttggtgacgtaatcgtctgcgcccatttccagcccaacaatacggtcaatccgatcgctgcgtccggtaaccagaataatccccaccgttgagcgttctcgcagggcgcgggttaacatcaggccattttcatcgggtaagttgatatccagcagaattaaatctaccgactgattctgcataatttcccgtagcccggcaccgctcgccgtaacggaaacggtatacccctcctgagtgaagtaggattgtaatcgcgcctgggtaaccggctcatcttcaacaataacaatgtgatgtggcatcagagggttttactcattctgttcatatctgttcatattatgccgtaagccgttcatcctgaccagtgccgctgttcatatttgctcattaagatcgcttcactaaaccataattctacaggggttattatgcggaaactctggaacgcgctacgccgacccagtgctcgttggtcggtactggcgctggtcgcaattgggattgtgattggcattgcgctgattgtattgccacacgttgggatcaaagtcaccagcacaaccgaattttgtgtcagttgccacagtatgcaaccggtgtatgaagaatataaacagtcggtgcatttccagaacgcctccggcgtgcgagctgaatgccatgactgtcatatcccgccggatattccaggcatggtgaagcgcaaactggaagcgagcaatgatatctaccagacctttattgctcactccattgatacacctgaaaaattcgaagccaaacgcgcggaacttgccgagcgtgaatgggcgcgaatgaaagaaaacaactcggcaacctgccgctcctgccataactacgatgcgatggatcatgcgaagcagcatcctgaagcagcacgtcagatgaaggtggcagcgaaagataatcaatcctgcatcgactgtcataaaggtattgcccaccagttaccggatatgagtagcggcttccgtaagcagttcgatgagctgcgcgccagtgctaatgacagtggtgacacgctgtactctattgatattaagccaatttatgcggcgaaaggcgataaagaagcctctggttctctgctgcctgcttcggaagtgaaagtccttaaacgtgacggcgactggctgcaaattgaaattaccggctggacggaaagcgccggacgtcagcgtgtactcacccaattcccaggtaaacgcatctttgttgcctcgattcgtggtgatgtgcagcagcaggtaaaaacgctggagaaaaccaccgttgccgacaccaataccgagtggagcaagttgcaggccactgcgtggatgaagaaaggcgacatggtgaacgatatcaaaccgatctgggcttatgcggattcgttgtacaacggcacctgtaaccagtgccacggcgcaccggaaatcgcccactttgacgctaacggttggatcggcacgctcaacggcatgattggctttaccagtctcgataaacgtgaagaacgcaccttgttgaaatatctgcaaatgaatgcgtctgacaccgcaggtaaggctcacggcgataagaaggaagaaaaataatgaacaataacgatctctttcaggcatcacgtcggcgttttctggcacaactcggcggcttaaccgtcgccgggatgctggggccgtcattgttaacgccgcgacgtgcgactgcggcgcaagcggcgactgacgctgtcatctcgaaagagggcattcttaccgggtcgcactggggggctatccgcgcgacggtgaaggatggtcgctttgtggcggcaaaaccgttcgaactggataaatatccgtcgaaaatgattgccggattgccggatcacgtacacaacgcggcgcgtattcgttatccgatggtacgcgtggactggctgcgtaagcgccatctcagcgatacctcccagcgcggtgataaccgttttgtgcgcgtgagctgggatgaagccctcgacatgttctatgaagaactggaacgcgtgcagaaaactcacgggccgagtgccttgctgaccgccagtggttggcaatcgacggggatgttccataacgcttcggggatgctggcgaaagctattgccttgcatggtaatagcgttggtacgggcggagattactctaccggtgctgcgcaggtgatcctgccgcgcgtagtcggttcgatggaagtgtatgaacagcaaacctcctggccgctggtattgcagaacagcaaaaccattgtgctgtggggctccgatttgctgaaaaaccagcaagcgaactggtggtgcccggatcacgatgtttatgaatattacgcgcagctaaaagcgaaagtcgccgccggtgaaattgaggtcatcagcatcgatccggttgtcacatccacccatgagtatctggggcgcgagcatgtgaagcacattgcggttaacccgcaaactgacgtgccgctgcaactggcgctggcacatacgctgtacagtgaaaacctgtacgacaaaaacttccttgctaactactgtgtgggttttgagcagttcctgccgtatctgctgggtgagaaagacggtcagccgaaagatgccgcatgggctgaaaaactgaccggcattgatgccgaaaccattcgtgggctggcgcggcagatggcggcgaacagaacgcaaattattgctggctggtgcgtgcagcgtatgcagcacggtgaacagtgggcgtggatgattgtggttctggcggcgatgctggggcaaattggcctgccaggtggtggttttggttttggctggcactacaacggcgcaggcacgccggggcgtaaaggcgttattctgagtggtttctccggctctacgtcgattccgcctgttcacgacaacagtgactacaaaggctacagcagcactattccgattgcccgttttatcgatgcgatcctcgaaccggggaaagtgatcaactggaacggtaaatcggtaaaactgccgccgctgaaaatgtgtatttttgccggaactaacccattccatcgccatcagcagatcaaccgcattattgaaggcttgcgcaagctggaaacggttatcgccatagataaccagtggacctcaacctgccgctttgccgatatcgtactgcctgcgaccacgcagtttgagcgtaacgatctcgaccagtacggcaatcactccaaccgtggcattatcgccatgaaacaggtggtgccgccgcagttcgaggcgcgcaacgacttcgatattttccgcgagctgtgccgtcgctttaatcgcgaagaagcctttaccgaagggctggacgaaatgggctggctgaaacgcatctggcaggaaggtgtacagcaaggcaaaggacgcggcgttcatctgccagcgtttgatgacttctggaataacaaagagtacgtcgagtttgaccatccgcagatgtttgttcgccaccaggcattccgcgaagatccggatctcgaaccgctgggcacgccgagtggcctgattgagatctactcgaaaactatcgccgatatgaactacgacgattgtcaggggcatccgatgtggtttgagaaaatcgaacgctcccacggtgggcctggctcgcaaaagtatccgttgcatctgcaatctgtgcatccggatttccgacttcactcgcagttatgtgagtcggaaacgctgcgtcagcaatatacggtagcgggtaaagagccagtattcattaacccgcaggatgccagcgcgcgcggtattcgtaacggtgatgtggtacgcgtctttaacgctcgcggtcaggtgttggcaggggcagtggtttctgaccgctatgcacccggcgtggcacgaattcacgaaggggcatggtacgatccagataaaggcggcgagcctggtgcgctgtgcaaatacggtaaccccaacgtgttgaccatcgacatcggtacatcgcagctggcgcaggcgaccagtgcgcacactacgctggtggaaattgagaagtacaacggaacagtggagcaggtgacggcgtttaacggccccgtggagatggtggcgcagtgcgaatatgttcccgcgtcgcaggtgaaatcatgaccacgctgacagcacaacagattgcctgtgtttacgcctggctagcgcagttgttctcccgtgagctggacgatgaacaactgacgcaaatcgccagtgcgcagatggctgaatggttttcgttgctgaaaagcgaaccgccgctggctgcggcggtgaatgagctggaaaactgtattgccacgctgacagtacgtgacgatgcccgtctggaactggccgctgacttttgcggcctgtttctgatgaccgacaaacaagcggcgctgccgtatgcatcggcctacaaacaggacgagcaagagattaaacgcttgttagttgaggcagggatggaaaccagcggcaatttcaacgaaccggcagatcatctggcgatctatctcgaattgctcagccatctgcatttttcgctgggagaggggaccgttcctgcgcgaagaatcgacagtttgcggcaaaaaacactgacggcgctgtggcaatggttaccagagtttgttgcgcgttgtcgtcagtatgacagctttggtttttacgcggcactaagccagttattgctggtgttagtggagtgcgaccaccaaaacagataacgtcgtttgtgcgcctgaaaagacgcgtttagcgtcgcatcaggcattatggcgcagttgccggatgcggcgtgaacgtcttatccggcccacaggaactgtaatctttgtagaccggttaagatgcgtcatcgcatccggcaaacacacatcacggatgagctacaaaccgggaaagccgctggcgcagcaggcggttttcctgcttcaggtgcgcaatatcatccattaacgtcagcgccaccgcgatccccggccagtccagagccagttcatgacgcaggcgtaccgcgcgttgcaccacaatggcggcatggtcgtcaaatacccaggttgtttcctggatctcacgcggttcaaccacccccaaaccgacaatttcattcaactcctcttcagagatgccggtatgcaggcaaaattcggtaatagtaaaagtcaccgtaacattagccattatgctttcccccaatctttacgtggatcaaaagacgactgggcgtctgccagttgctgccacagcgcggcagtgttttcatccggtttcggcggcatcacgattttcagtaccgcatacagatcgccggtctgttttttgctcaccagacctttgcctttaacgcgcaatcgttgcccggcctggctgcctggcgggatagtcagcaaaatgctttctttcagtgttggaacggtgactttagcacccagcgccgcttcccacgggctaaccggcaccacaatttccagatcctggccgacaatatcaaacagcggatgtggcgcaatatgaatcaccagccacaaatcgccatttggaccgccgttttcgcccggcgtcccctggcctttcagacggatgcgttgaccattgccgacgcccgccgggatcttcacattcagcgttttcggaatttcctgttcgatcatgccaaaggcgttataaaccggcaggttatagctgatggtacgcttatgctcagtaagcgtttcttcgaggaataccgccacttcgatttcaatatcgtggccgcgtgtggcggggcgttgacggctctggcgggcatgctgaccgaaaattgacgagaagatatcgtcaaaatcttcggcgttaaaactctgaccgtcgccatggtggaactgacggttaaattgcggatcgttgcgatgttgccacatctgatcatactcagcgcgacgttgttcatcacttaacacttcccaggcttcagcgacctctttgaagcgggcttcggcatccggttctttgctgacatcaggatggtatttgcgggcaagtcgacgataggcggtcttgattgtcttgagatcgtccgtcggtttcacgcccatgatggcgtaataatcctttaattccatagcgttatctcgcgtaaatcaacacaaattgaaggaacccctgtaaggtaactcctataagtgtagggtaatcctcaaaatttcatatgccaacacagaatatgttattgaaatcatcgcggagaggaggtcgccatcaagatgggttgctgaacatattttaaacaggtgaaaaagggtgagcgatttttgatagttgaaccaggcactttaagtttaactagggcgtcattatttattaaattttatagacgctatatatgggtagtaatatacatggaattagttgcactgcaaataattatttgaaacaggcctggaacgatataaaaaatgagtacgaaaaaaatcaaacatattcaatcacgctttttgaaaacacactggtgtgttttatgcggttatacaatgaactcagacgtaaagtaaatgaagaggatactccatgtctggaatgtgaatcactagaaaaagaatttgaggaaatgcagaatgataatgatctatcattatttatgagaacattgcgtactaatgatacacaaatttattcaggggtttcaggaggtattacatatactatacaatatgttcgagatattgatattgttagagtgtccttgccgggcagagcttcagagtctatcacagattttaaaggttattattggtataactttatggagtatattgaaaacattaatgcgtgtgatgatgttttttctgagtattgttttgatgatgaaaatataagtgtccagccagagcggataaatacgccgggaatatctgatttggattctgacattgatttgtctggtatatcttttattcagcgtgaaactaaccaggcattaggattaaaatatgctcctgtagatggcgatggatattgtctgttaagagctatactggttttaaaacaacatgattattcatgggcgctggtcagttataagatgcaaaaggaagtttacaacgaattcattaaaatggttgataaaaaaacgatcgaggctcttgttgatacggcattctataatctcagggaagatgtaaagacgttatttggcgttgatctacaatctgacaaccaaattcaggggcagagtagtcttatgtcatggagctttctgttttttaaaaaacaactcattgatagttgcttgaataacgaaaaatgtatcctgcatttacccgagtttatatttaatgataacaagaacttgcttgctttagataccgacacgtcggataggattaaagcggtgaagaattttcttgctgttctttcagatagcatttgctcattatttattgttaatagtaatgtggcatcaatctccttggggaatgaatccttttcaacagatgaagatcttgagtatggttatttaatgaacactggcaatcattatgacgtttacctccctcctgaactttttgctcaggcttacaagttaaacaataaggaaatgaatgcgcaactcgactatttaaatcgttatgcaatttaatggcaaaggcatatgctaaaaaccattgttattagtctcacacttttttattggtaaatattgtctctgtattggtaacgccgcagatattctgtttagccacaggtgcaattatcagcggcgtacgcgaggcaggggctaatcaggcatagtttgcgtcaaaccttgcctgtttttgaagatgtatatagaaaaacaggcgttcaacaagccattttgcgaacctgttcccggaaaaaagtcatatttctgtcacactctttagtgattgataacaaaagaggtgccaggaatgaacaaaacgctaatcgccgcagctgtggcagggatagttttactcgcttcaaacgctcaggcacaaaccgtaccggaaggctatcagctacagcaagtgctcatgatgagccgccataacttacgtgcgccgctggcgaacaatggcagtgtgctggagcagtcgacgccgaataaatggccagaatgggacgtccccggtgggcaactcaccaccaaaggtggcgtgctcgaagtgtatatgggccattacatgcgtgaatggctggcagagcaggggatggtgaaatcgggggaatgcccgccgccgtacaccgtttatgcctatgccaatagtctgcaacgtaccgttgcgaccgcacagttctttattaccggcgcattcccggggtgtgatattcctgtgcatcaccaggaaaaaatgggcactatggacccaacctttaacccggtgatcaccgatgattccgccgcattcagtgaacaggcggtggcggcaatggagaaagagctcagcaaactccagcttaccgacagctaccagctactggaaaaaatcgttaactataaagattcccctgcctgtaaagagaaacaacagtgttcgctggtggatggcaaaaatacctttagcgccaagtatcaacaagaaccaggtgtttccgggccgctgaaagtcggcaactcgctggtagatgcgtttactttgcaatattacgaaggttttccgatggatcaggtggcctggggagaaatcaaatctgaccagcagtggaaggtgttgtcgaagcttaaaaacggctaccaggacagcctgtttacctcaccggaagtggcgcgcaatgttgcgaaaccgctggtcagttatatcgacaaagctctggtcaccgatcgcaccagcgcaccgaaaattacagtgttggttgggcacgactccaacattgcctctctgttaacggcgctggatttcaaaccgtatcagttgcatgaccagaacgaacgcacgccgattggcggcaaaatcgttttccagcgttggcatgacagcaaagccaatcgcgatttgatgaaaattgaatatgtgtatcagagtgcggaacagttacgtaatgccgatgcgttaaccctgcaggcacctgctcagcgtgtgacgctggaattaagcggttgcccgatagatgccaacggtttctgcccgatggataaatttgatagcgtgttgaatgaagcggtgaaataacagaaaactcccccgcgagaagcgggggagtcgctggttaaacgtttttacgttcgatggtctgttcgccccaaaaaagcgaatctttatcggtcttagcaaaggctttgactaacacttcatcgctaccttcttcccaaatcttttccgccattttttcgtcgtacccggcgacttcgaaaatggcctcggctatttccggcgacgtattgcgcagagatgcccattcaccgacgtgatgagctttcgcttcttgagttggcatgcgtatcctcctgttgaagattagccgttaagtttaactgccagacctgcgacatattccccttgataacgagcaatagacagttcttcctggcttggctggcgtgagccgtcaccgcctgcgatggtggttgcgccgtacggcgtaccgccgcgaacctgtgaaacgtcaaataattcctgcgctgcgtagccaatggggacaattaccatgccgtgatgcgcaagggtcgtccaggttgaagtaatagtttgttcctgaccgccgccagtaccggtggaactaaagacgctcgccagttttccgtatagtgcgccggaagcccacaggccgcccgtctggtcgaggaaggtacgcatttgaccggacatgttgccaaagcgggtaggtgtaccaaaaataatggcgtcgtaatcggccagttcttgcggggttgcaaccggtgcagtttgcgttttaccgcctgctttttcaaataattgcggcggcatggtttccggtacacgcttaacgacaacttctgcgccatccactttgcttgcaccctcagcgactgcgcgtgccatcgtttcaatatgtccgtacatggaataataaagcaccagaactttagccatttctaaccactcctcgtgttatctctattccgtagcgattcgctaccacttatttaaagataagacgtccttttcagagtgcaaatttcacaaccacttatttgatttataacaactttcacaagcacgtaattttgtcgcaaaatgacacatttttatctcatcgcgtttttttaatcataagagcggcttatggataattattggagatgatatctattctcgctaagaagctgttgcaggatattaccaaacgcgggtctgcccgcgtcagttcactaagcttagtcccacgtagcgaaaatatggcagccgccatacgccgcgttaattctatgcaatatgatgtctatacccagacggaggtcagtaatggcaaaccatcgaggcggttccggcaattttgcagaagaccgcgaaagagcatcagaagcaggtaaaaaaggtggacagcacagcgggggtaatttcaagaatgacccgcagcgcgcatctgaagcaggtaaaaaaggtggcaagagcagtcacggcaaaagcgacaactagccggactaatcagtgacgaatgcatttttgtctgtagctcgtcaaaaagccatcaccgccggttacccggtggttgatactgatgacaaatgtaagcttgcctgatgcgcgatgcttatcaggcctaccagaagattgcaatatattgaatttgcactgttttgtaggccggataaggcgtttacgccgcatccggcatgaacaatgcgtacgttgtcaacaatctgcaccgccgggtaatcccggcggttttctttttatggctcctgatgaacaacttctggcggtggaacgtcaaccaaccttctgcttaataacgcattgagtaaaatcgcgccaaaggttgctgtaccaatccctcccaacgtaaaaccgcccagcgtgagagcaaaatcacccgcgcccagcactaaggttactgcgaccataatcaaattaccgttctggcttaaatcgacacggttttgtacccagatccttgcgcctgcgacggcaatcagcccgaacacaacaattgatgcaccaccaatcaccgcggccggaatggtatgaatcagcgcgccaaatttcggtgaaaagcccaacagcatggcgatgacggcagcagcgacaaacaccagcgtcgagtagacttttgtcacggccattacaccgatattctcggcgtaggtggttacgccgctgccaccgacagaaccagaaagcatcgtcgccagcccatcaccgacgaatgcccgtcccatatatggatccatattgcgtccggtcatcccggcgactgccttgagatgacctaagttttccgccaccagaatcaccgccacgggcgcaatcagcatcattgcctgaccattaaaagcaggagtggaaaaatgtggcagaccgaaccaggcagcatggctgacgagagtataatcgacggcttttcccagccctaaaacgttggtcatcacgccatacagcagacaggcgacaattaatcctacgagaatcaataaccgctggatcatgccacgggtaaacaccgccaccagcccaatacacagcaccgtcattaccgccatccagctatcaaaggccgaagccgatacacttttcactgcgataggcgctaagttcaggccaatcgccatcaccaccgcacccgtcaccaccggcggcatcagtcgttcaatccagcgcgtaccgattttcatcaccaccaggccaatgacggtataaaccagcccacaggcgataatcccgcccagcgcaatgctgatattcgggttaatgccctgaccgttaaagcccgtcgcggcgatcaccacgccgacaaaagccgcgctggagccgagataactggggacgcgcccgccggtaataaagaaaaacagtaacgtgccgatccccgacattaaaatggaaagattgggatccagccccatcagaatcggcattaacaccgtcgcgccaaacatcgccaccgcgtgttgaacgcccattactgccgtctgagcaaacggcaatcgttcatccggcgcgaccacgccgctctctgtagaggtcgattttaactgccagtgaggaaaaccgaacattgccatcagctgtctccttaaggaggttaacaagcagggcgcatcagcgcgtgataactgcgatcgaaccacaccagcccgtagggtgtggtgtgacgatgaatcgcttcgatggcgcaaaacagaatgtcgtgggtgccgacgctcaccacctggctgatacggcagtcaaacgaaaccagagcctcttccagttgcgggcatccggtcacccccgtctgccagcgggcggcggcaaagcggtgttccatgggcgttttgccgccaaaaaggtttgaaagcggctcctgcccggcgctaagtgtatttacacacagcgttcgattttcattgaatgccggccagacggacgccccacgattcaggcacaccagtaatgtgggcggcgtatcggtcacactgcagacggcgctggcggtgaacccggcgcgcccggctggaccgtccgtggtgataatattgaccgccgcgcccatgcaggacatcgcatcgcgaaaagtttgttgatcgacaatgttcatagtttgctccttacaacagcccgcaggcttcttcaaaggacagacgtggcaggcgcgcataaagcttgctgctatcgccatagccgatattaatcagcagattgctcttcagcgtgctgcccgtaaaaaaggcgtcgtccacgtgttgacggtcaaagcccgacatcgggccggtatccagtcccagcgcccggcaggcgacgatcagataggccgcctgcatggaactgttgcgaaacgctgtttcttcggcaagttgtgggctggaggtaaaccaactgcgggcatcaccgtggggaaacagtagtggtaaccgttcataaaattcactgtcccaggcgacgatagcggtgacgggcgcggtcagggttttttgcagattgccgctggaaagtgccgggcgcagacgttcttttccttctgccgtgcgggtaaacacgatccgtgccggagaacagttagctgatgtcggcccccatttcatcagggcataaatctcccgtaacgtctcatcgctgacgggtgtctcccgccagccgttgtgagtgcgggcatcggtgaacagggtgctaagcgcacctgggctaacggcttcgttcatagcaattccttacagggcggcttcacggtgatgtaacaggctggcaagcccgttgagtaacagagcattaaacgtttcgggatcggtcacgttgcaggcgtgtccgccatagggcatcaccattttctggctatcgggcagggcggcatgaagttcactggaacatgctgttggcaccagcagatcatcactggcgcagatgatttgcaccgggcagcggatgcgatccgcatggtgactaaagtcagcgcgtttgagggcgttaagtcgacgcagtaaattatttttgccctgaaaatgcgccagtgccagcgcgtcttctgcctccaggcgaggtgcgcgggccgccatccagtcggcgggatagaggaacaacggctgcgcttccacccatgcctgcgcgccgccgctatacagtaatcgttcgcgaacctgaaaacagcggcgcgtatgggcgtttattcgtagccagccgttaacgctgatcagcacagttaccgacgcgggataatccagcgccagctgcattcccaccagcgcaccgagcgcatggccgaccactgcgtaatgctcaatccctgcggctaccagcgcctgatgcagttccgctgccatctgggcgatactgtaatcttctgccagcgtgtcgggattattgccggtgccgcgctggtcgtaacagactacctgatactcctgctccagcaccgccagttgcggtaaccagtaactgccgctacccccaagacccgaaatcaacaccactacgggcgcatcagcataagggggaggtgagagtgaaagtttcatcgcggcctcacttggcgatatgcgcaattgtggcgatttccaccagcgcgtcaggttttaccagtccgcactgaatgcagaatcgcgccggtttatcacccggaaaaaactcggcgtagatttcgttaatcgcggcgtaatttttccagtcggtaataaagatgctgttgaaggtcacatccgccatcgtgccacccgccgtctcgatcaccttgcggatagtttccagaacgtggcgggtttgcgcctttgggtcatcggcaaacagcacgttattatgttgatcaaaagccagcgtaccggagacatacaccacgccatcagccagcgtgccgggaacgaagggggccagcggtgcgctgctgccagcgggaataattacggattttggcatcgttaaactccttaagcgatatgagcaaaggacgtgggagaaagcgcgtcgcagaatgtttcgacgtcgctgacccagccaaaaaaggtttcgatattgaacaacgcggctttctgcgcaaatttcggccccgcctggtgagttgcgtcttcaagcaccacgccgaaatactccagaaaaaagccgtcgcgtagcgtcgattcgacgcagacgttggtagcgatgccggtgaaaaccagatggcgtattccgcggctgcgcaaaatgctgtccagcggcgtattgaagaaaccgctgtagcgcggcttcggcagcacaatatcgccaggctgcggcaccagttcatccaccagttgataatcccaggagcctttcgccagcaatttcccctgcagctgcggctgcttacgcatggttttcagggcgttcgatttatgaaaattcggtgagccgggtccgccagcctcgacatactgttcatcccagccattttgaaaccagatgatcagcatccctgccgctcgcgctgcggtcacggcggtttgaatgttggcaatgaccgggcgagtggttgagacatcaaacccggcgagatctaagtagccgcctggcgtggcataagcgttttgcatatccaccacgatcagcgcactttgctgcggatcgaaggtaatggcttccggtcgagcggttaaggtcgtcatcatgccacctcctgagtcagcgcaggtagatgggcgcggcattgcatcagtggttgaatgcgctcgccgaaggtttcgattcccgacagaaaatcgtcgaaggttaacagcacgccttcggcaccaggcacgcttgcgacttcatctaacatgcgcgcgacactggcgtaagaaccgactaacgtccccatattgatgtttaccgccgaagtgggatcggccatctgacgaacgttggtgtcagtaccggagcgggtatctttctgactttgttcggttagccagcttaacgcctcttcatccgcgcccgctttgtagtgttcccatttggcgcgagcggcatcgtcggtttcatcggcaatcaccataaacaacacataagagccaacgtcgcgtccggtttgctctgcggcctgtttcatccgcgcagcggtcggggcgaaagccgtgggtgtatttacgcctttgccgaaacagaagttgaaatcggcataccgggcggagaacgccatgccagcgtcgctttgcccggcgcagatcactttcatggggacactcggttgcggactcacgcgacaatcattcatggtgaaaaaatcgcctttaaaatcgcttttccccgtgccccacaggtcgcgcagcacctgaacatattcggtgagatagtcgtaacgacgggagaaatagtcatcgccaggccagatacccatctgctcatactcgggcttttgccagccagtcacgaggttgacgccaaaacgcccgccagagatggagtcgatggttgcggccatacgggcgacgattgccggaggtaacgttaaggtggcagcagtggcgtaaatctgaatgcgcgaggtcacggccgccagccccgccatcaaggtgaacgactcaaggttgtgatcccagaactcagttttgccgccaaagccacgcagtttgatcatcgacagggcgaaatcgaaatggtagtgctccgctttttgcacaatggctttattcagttcaaaggtcggcatgtactgcggcgcgtgggtcgaaatgagccagccgttgttgccaataggtacgaatacgccaattttcatcatcaacctctcttcgtctcgtaaagtgaaagtcagacggggcgctgcatcctgcatatccttttcagccgcgtattggcttgtttgcaaagcggatgccagtttttaaaaagttaatgttattaatctgttaacattacgttatctaaaatatctggtaaaaagtggactaaacggtcaaaacagttgcacataaaacatgcatctgtgcgcgatgagagtgcagaaggtcgaggccgggcgggggttttgctatcctgttgccaatctacaagaggggagagcgcatgacgcaaggcgcagtgaaaacaacgggtaaacgttcgcgcgcagtaagcgcgaagaaaaaagcgattcttagcgcagcactggacactttttcacaattcggttttcacggcacaaggctggagcagatcgcagagttggcgggtgtttcaaaaaccaatctgctgtattactttccgtcaaaagaggcgctgtatattgccgtgctgcggcagattctcgatatctggctggcaccgttaaaagcgtttcgtgaagatttcgccccgctggcggcgatcaaagagtacatccgtctgaagctggaagtctcacgcgattatccgcaggcttcgcgcctgttctgtatggagatgctggcaggcgcgccgctgttaatggatgaactgacgggcgatttgaaggcattaattgatgagaaatcggcgctgattgccggttgggtcaaaagcggcaaactcgcgccgattgatccgcagcatttgatttttatgatttgggcttccactcaacattacgccgatttcgcccctcaggtggaggcggtgacaggcgcgacgttgcgcgatgaggtatttttcaatcaaacggttgaaaacgtgcagcggattattattgaggggattcgaccacgttaaagatgccggaggaggttgtaacatcctccggctacctgtttaacctatagtcattaagctggcgttaccgccagcggcagcggtattcacactcagcgaacgctcgatatacagccgttccagaaggatattgctttcgccacgggcaaaaccctgcaccgaaacaattgtgccatcccgcgcggcaactgcttcacacaatgcgcgaagctgatccgaatcaccgtggaagatcaccgcatcaaacggttgagcggttatattttccgctttcgccagttgaatacgttcgctgactgccgatggcaatgccttcactaactgacgatgcagcgcgtcatccggccacagtacctggctgcccaccgccagcacggcggcgagctgagtcagcgcatcctgctcatcatcggcaatacacaacacgcgctcacgcggcagcagcgtccaggtgttgcgttcacccgtcggccccggcagcaatcgttgtgttcctgcctgcgccagctcgccatattgcgtacataacgcctgcaattctggacgatttgctgcccattcccgcagtgcatttagcggctgagtcaatgcggctttcaactgcgcatcgaccggatactttgcatcctgacgcgcgagcgtcactgccagcgcactttccgggcgattcgccagcagacggtagagatagagcggaccgcctgctttcggcccggtaccggacaacccttcgccgccgaacggctgcacaccaaccactgcgcccaccatattacggttaacatacaggttaccaacatgggccgagccagtgacctgggcgatggtttcatcaatgcgcgtatggacgccaagcgtcagaccataaccggaagcgttaatctgctcgatcagctctggtagctggttacggttgtaacgcaccacatgcagcaccggaccaaagacctctttttgcaattcggcaaagtcatccagttcgatcagcgtcggggcgacaaaggtgccgctttgccattcacgggcatcttcgctgttttcccgcaccgcctggaacaccggacggcctttgctacgcatggtctgaatatggcgctcaatattggctttcgcttcgctatcaatcactggaccgatatcggtggtcaggcgacccggattacccatccggcattcggccattgcgccgcgcagcattttcaacgtgtggtcggcaatctcatcttgcaggcacagcacgcgcagcgccgaacaacgctgacccgcactgtcgaacgccgaggccagtacatccacgacgacctgttcggtcagtgctgaagaatcgacaatcatcgcgttcatgccgccggtttcagcgatgagcggaatagggcgaccctgagcgtccaggcggctggcgatattgcgctgcagtaacgtagcgacttcggttgaaccggtaaacatcaccccgcgcacgcgatcatcacccgtcagttgcgcgcccacggtttcaccccgacctggcagcaattgcaccacgcctggcggtacacccgcttccagcaaaatggcgatcccttgcgcggcaatcagcggcgtttgttctgccggttttgccagcacgctgttacctgccgccagtgcggcggcgatctgcccggtgaaaatagccagcgggaagttccacggactgatacacaccacaggccctaatggacggtgggtttcgttagcgaaatcatcccgcacctgtccggcgtagtagtggagaaaatcgaccgcttcgcgcacttcggcaatggcgttactgaaggtttttccggcctcacgcaccagaataccaatcagttgctgcatctggctttccatcagcacggcagcgcggtgcaaaatcgctgcgcgttcagccggaggcgtggcaaaccagattggcgcgttattaaccgcactttccagcgcctgttctacttcacgcggcgtggcttcacgcacatagcccacaatatctttcggttccgcagggttaataacgggcgacatctcacctgccgctaccggttgttccagcattggcaaggcctgccatttttgcagtgcactattgagcagggcagaggagagcgaggccaggcggtgttcgttagcgagatccagccctgccgagttgtcgcgcccgtgaccgtaaagatcgcgcggcaggggaattttcggatgcggtaatccagtttgcccttcctgttgcgccagtttttctacagcagtgaccggatcggcgaccagttcatccagtggcaaagaggtgtcggcaatacggttaacaaacgaggtgttagcaccgttttccagcaggcgacgcaccagatacgccaacagcgtttcatgtgtgccaaccggagcataaatacgacacggacggttaagtttgccgtcggcaactttcccggtgacctgctcatacagtggctcgcccataccatgcaggcactggaactcgtactgacccgggtagtagttctgccccgccagttgataaatcgccgccagcgtatgggcgttgtgcgtcgcgaactgcgggtagattagattcggcaccgccagcagctttttcgcacaggcgagataagaaacgtcggtatacaccttgcgggtataaaccggataaccttcaaggccgtccatctgcgcacgcttaatttcactatcccagtacgcgcctttcaccaggcgaatcatcagacggcgacggctgcgggtggcgagatcaatcaggtaatcgatcaccaacgggcagcgtttttgataagcctgaataacaaaaccgatgccgttccagcctgccagttccggctcgaaacagagtttttccagcagatcgagggagatctccaggcgatcggactcttcggcgtcaatgttgataccaatatcgtactgacgcgccagcagggtgagtgatttcagacgcgggtaaagctcttccattacccggtcatactgggcgcggctataacgcggatgcagcgccgacagtttgattgaaatgcccggcccttcatagatgccacgaccgttagacgctttaccgatggcgtgaatcgcctgctgataggaaaccatatacgcctgtgcatctgcggcggtcagcgcggcttcgcccagcatatcgtaagagtaacggaaacctttctcttccagcttgcgggcattggctaacgcttccgcgatggtttcgccagtgacgaactgctcacccatcaggcgcatcgccatatccacacctttgcggatcagcggttcaccgcttttaccgataatgcggttcagcgagcgggagaggctggcttcgttatgggtggaaaccagtttgccagtaaacagcagcccccaggtggcggcattaacaaacagtgacgggctacgaccaatgtgtgactgccagttaccgttgctgattttgtcgcgaattaacgcgtcgcgggtggctttgtcgggaatacgcaacaacgcttccgccagacacatcagcgccacgccttcctgcgatgacagcgaaaactcctgcaataacccctggaccatacctgcgcgaccactggcatttttttgattacgcagtttatcggccagctgatacgccagtttgtgcgcctgttcagcaactggctgcggcaggcgggcttgttccagcagcatagaaaccgcttcggtttccgggcggcgataggccgcggtgatcgcggcgcgggaaaccgactggggcaatatttgctcggcaaagtcgaggaatggctggtgtggttcctctgccggagtcggtgcttcatcgctctcattggccgcgccagaaagcagcgcaggtagctccggcagagtatcgctgttttccagttgttcgagataagaaaaaatcgcctgcttaattaaccagtgtggtgtgcgatcgatacgtgtcgcggcagacttaatacgctcacgcgtcgcgtcgtccagcttaacccccatggtggtggttcccatgccattactcctgttgttcagaaaggtgcaacttaacgttatcgtgaaatatccatgatgttgcaactttgtgcaaccatgttaaatgtgacatgcgtagcaagcttaaaaatgaatgaaatgttaataaaagaaatcgatatgacagggattaaaaaaataactcagactttttctctgcggcagttaacatttttgaaaggtgcaaccgcaaaaaatgtgagagagtgcaacctgatgaaaaatagtgtcgctgagcactaaaatttaatgtaaatggtgtgttaaatcgattgtgaataaccagcgcttccggcaggatacggtcgccctggtaaaacataaactctgttaccccgttccggtggcagatataacggcaagtttcgacattgccgataataattttttggagactttagatggctattagcacaccgatgttggtgacattttgtgtctatatctttggcatgatattgattgggtttatcgcctggcgatcaacgaaaaactttgacgactatattctgggcggtcgtagtcttgggccattcgtgacggcattatcggcgggtgcgtcggatatgagcggctggctgttaatggggttgccgggcgctgtttttctttccgggatttccgaaagctggatcgccattggcctgacattaggcgcgtggattaactggaagctggtggccgggcggttgcgtgtgcataccgaatacaacaataacgccttaacactgccggattatttcaccgggcgctttgaagataaaagccgcattttgcgcattatctctgcgctggttattttgctgttcttcaccatttattgcgcttcgggcattgtggcaggcgcgcgtctgtttgaaagtacctttggcatgagctacgaaacggctctgtgggcgggcgctgcggcgacgatcctttacacctttattggcggtttcctcgcggtgagctggactgacactgtacaggccagcctgatgatttttgccctgatcctgacgccggttatcgtcattatcagtgtcggtggctttggtgactcgctggaagtgatcaaacaaaagagcatcgaaaacgttgatatgctcaaaggtctgaactttgttgccattatctcactgatgggttgggggctgggttacttcgggcagccgcacattctggcgcgttttatggcggcggattctcaccacagcattgtccatgcgcgtcgtattagtatgacctggatgatcctctgcctggcaggggcggtggctgtcggcttctttgggattgcttactttaacgatcatccggcgttggctggtgcggtaaatcagaacgccgagcgtgtgtttatcgaactggcgcaaattctgtttaacccgtggattgccgggattctgctgtcggcaattctggcggcggtaatgtcaaccttaagttgccagctgctggtgtgctccagtgcgattaccgaagatttgtacaaagcgtttctgcgtaaacatgccagccagaaagagctggtgtgggtagggcgtgtgatggtgctggtggtggcgctggtggcgattgcgctggcggcaaatccggaaaaccgcgtgctgggcttagtgagctacgcgtgggcaggctttggcgcggcgtttggtccagtggtgctgttctcggtgatgtggtcacgcatgacgcgtaacggtgcgctggcggggatgatcatcggtgcgctgacggttatcgtctggaaacagttcggctggctgggactgtacgaaattattccgggctttatcttcggcagtattgggattgtagtgtttagtttgctgggtaaagcgccgtcagcggcgatgcaaaaacgctttgccgaggccgatgcgcactatcattcggctccgccgtcacggttgcaggaaagctaagggacttagcctgcggcggttttgtttggcttcagcagcgggttgcgctcccttaatgtgcctcgccatataaattgaatggtgcagggagcgcgcagggggcggccaatcgccgccgccccctgctgtcccggccttcggggaacgcttcagcgattttgacgccaccaacacccgagctgttattatgttccgggcaaaaagttagatttgataatcgcggatggacgaaattgcttgatacacccgcttatcagttttacatggaagctctgatgcattgagtctggacagttttgtcggctggatacggcgtttacgcggcatccggcaagaacacatggttctttgcaaacaatcccatctttctaccctggaataatcgtttatatcccttggcattacctctctttgtttacattccaacatcattttataaacattccgcttgtgtttttctttgccgtaatgataatcgctatcactgcgatttacttttctttgcatagattgactcagaaaaacgtttaagggtgggtggcatgtttgttccgtttctcattatgttgcgcgaaggacttgaagccgcgctgattgtcagtttgattgccagctatcttaagcgtacccagcgaggccgatggattggtgtgatgtggattggcgtgttgcttgccgctgcgttgtgcctgggcttgggtatcttcattaacgaaaccaccggcgaatttccgcaaaaagaacaggaactgtttgaaggtatcgtggcggtgatcgccgtggtgatccttacctggatggttttctggatgcgcaaagtgtcgcgcaacgtcaaagtgcaactggaacaggcagtcgatagcgcattgcagcgtggaaatcatcatggctgggcgctggtgatgatggtcttttttgccgttgcaagggaagggctggagtcggtctttttcctgctggcggcatttcaacaagatgtcgggatctggccgccgctgggtgcaatgctcggtcttgctactgccgtggtgctaggcttcctgctctactggggcggtattcgcctcaatcttggtgcattttttaaatggaccagcctgtttattctcttcgtcgccgcagggctggcagctggtgccattcgcgcatttcatgaagccggattgtggaaccactttcaggaaatcgccttcgatatgagtgcggtgctctcaactcactcgctgtttggcacgctgatggaagggatttttggctatcaggaagcgccgagcgtcagcgaagtcgccgtctggtttatttatctcatcccggcgctggtggcatttgctctgccaccacgcgcaggggcgacagcgtctcgctccgcgtaacaaatacgacgcaaactcttgcttagttacaacatactttaaagggatagtctcgtcatgaccattaacttccgccgtaacgcattgcagttgagcgtggctgcgctgttttcttctgcttttatggctaacgccgctgatgtgccgcaggtcaaagtgaccgtgacggataagcagtgcgaaccgatgaccattacggttaacgccgggaaaacacagttcattattcagaaccacagccagaaggcgctggagtgggagatcctcaaaggcgtgatggtggtggaagagcgggaaaatatcgcccctggctttagccagaaaatgacggcgaatttacagcctggcgaatacgatatgacctgcggtctgctgactaacccgaaagggaagttgatcgtcaaaggtgaggcaacggcggatgcggcgcaaagtgatgcgctgttaagtcttggtggtgcaattactgcatataaagcgtatgtcatggcggaaaccacgcagctggtgaccgacaccaaagcctttaccgacgcgattaaagcaggcgatatcgaaaaagcgaaagcactgtatgcaccgacgcgccagcactatgagcgtattgaaccgattgctgaactgttctccgatctggatggcagcattgacgcccgtgaagatgattacgagcaaaaagccgccgacccaaaattcactggtttccaccgtctggaaaaagcattgtttggcgacaacaccaccaaagggatggatcagtacgctgagcagctttataccgatgtggtcgatttgcaaaaacgcatcagtgaactggctttcccaccttcaaaagtggtcggcggcgcagccggactgattgaggaagtggcagccagcaaaattagcggtgaagaagatcgctacagccacaccgatctgtgggatttccaggctaacgttgaaggctcgcagaaaattgtcgatttgctgcgtccacaactgcaaaaagccaacccggaactgctggcaaaagtcgatgccaactttaaaaaggtcgataccattctggcgaaataccgtactaaagacggttttgaaacctacgacaaattgaccgatgccgaccggaatgcactgaaaggaccgattactgcgctggcggaagatctggcgcaacttcgcggtgtgctgggactggattaagcgttatgcagtataaagatgaaaacggcgtgaatgaaccgtcacgccgacgtttactgaaagtgataggtgcactggcgctggcgggaagttgtccggtcgctcatgcacaaaaaacgcaaagtgcgccgggtacgctttcaccggatgctcgcaatgagaaacagccgttttatggtgagcatcaggcagggatcctgacgccacaacaggccgcaatgatgctggtggcgtttgatgtgcttgccagcgataaagccgatcttgagcggttgtttcgcttgttgactcagcgttttgcttttctgactcagggcggagcagcaccagaaacgccaaatccgcgcctgccaccactcgattccggcattcttggcggctacattgcgcccgataatctcaccatcacgttatcggtgggtcactcattgtttgatgagcgctttggccttgcgccacagatgccaaaaaagctgcagaagatgacgcgtttccccaacgactcgctggatgcggcgttatgtcatggtgatgtgttgctacagatttgcgccaacacccaggacacggttatccatgcgctgcgcgatatcatcaaacacacgccggatttgctcagtgtgcgctggaagcgggaagggtttatttccgatcacgcggcgcgtagtaaaggcaaagagacgccgattaatttgctgggtttcaaagacggcactgccaatcccgatagccagaatgataagttgatgcaaaaagtggtgtgggtaacggcagatcagcaggagcctgcgtggacaatcggtggcagctatcaggcagtacgcttgattcagtttcgagtggaattttgggacagaacgccgctgaaagaacagcagacgatttttggccgtgataagcaaaccggtgcgccgctgggaatgcagcatgagcatgatgtgcctgattacgccagcgacccggaagggaaggtgatcgcgctggacagccatatccggctggcgaatccccgcacggcggagagtgagtccagcctgatgctgcgtcgtggctacagttattcactgggcgtcaccaactccgggcaactggatatggggttgctgtttgtctgctaccaacacgatctggaaaaaggcttcctgacagtacaaaaaaggctcaatggcgaagcgctggaggaatacgttaaacctatcggcggcggttatttttttgcgctgccgggggtgaaggacgcgaacgattatttcggaagcgcgttattgcgggtttaatgtttttaggcggataaggcatttgtgcgcagatgcctgatgcgacgcttgcgcgtcttatcatgcctacaatcagtgcgggtttggtaggctggataaggcgttcacgccgcatccggcgatcgtgcactgatgcctgatgcaaatcctgctgaaagcacacagcttttttcatcactgtcatcactctgtcatctttccagtagaaactaatgtcactgaaatggtgttttatagttaaatataagtaaatatattgttgcaataaatgcgagatctgttgtacttattaagtagcagcggaagttcccggcagtgatagtcagtcactatggagatcgcggatggtaacgtcctgtactggacatgttttagataatcaacgcgccaccactcgcggagttttctcctccggtagtcatctcgtcactttgcattttcaacctcatcctttcttttcatgtgttaccgacgccgtaaacggtgcgcgtagccgtttttcggcattttatccaaaagcaaactatggcttacaaggaagccaaccctctgatgttcgtgcgcataatcgcgctgccaacggcgcgtgtgatgaatacaaacaactcaaggtgctctccatgggaagacaaaaagcagtgatcaaagctcgtcgcgaggcaaaacgtgtgctgagacgggattcgcgcagccataagcagcgtgaagaagaatcggtcacctcgcttgtgcagatgggcggcgtagaagccattggtatggcccgcgacagtcgcgatacttcgcccatcctcgcgcgaaatgaagcgcaattgcactatctgaaggctattgagagtaagcagctgatattcgccacgggcgaagccgggtgcggaaaaacctggatcagcgcagcaaaagcggcagaggccctgatacataaggatgtcgacaggattatcgtcacccgtccagttctgcaagccgatgaagatcttggcttcttacctggagatatcgcagaaaagtttgctccctattttcgcccggtctacgacgtgctggtccggcgcttaggggcttcctttatgcagtactgcctgcgaccggaaatagggaaggtggaaattgcgccgttcgcctatatgcgtggacgtacctttgaaaatgcagtcgtcattcttgacgaggcgcagaatgtgactgccgcgcaaatgaaaatgtttttaacccgcctcggggagaacgtgacggttatcgtcaacggtgatatcacgcaatgcgatttgcctcgcggcgtgtgctccggattaagtgacgcgctggaacgtttcgaagaagatgaaatggttgggatcgtccggttcggtaaagaggactgcgtacgttcggcactttgccaacgtacgctgcatgcctacagttaagtgtgttatcggtgcagagcccgggcgaaccgggctttgttttgggtgtttatgcccggactagcgctttttctgaaacaaccatttttatttgcccctggctggtgaagtgtacgctcatcctgtggcttttttgtagttgctgatagagctcatcaggtattgctaagctctctgcatattcttgcggcgtatattggtaggctgcatgatgctgctgtttttgaaaacgcagcttattgtacagcgcccagacaattaacacgacggcattcgccactgccagcaaaaaatagaactgaagtcggcttctggcctcgctttgccagtaataacccgtcagcagatccatggcgaataagaatatgaacaacgcaaataatgtccacaagatggttgtggcaacataatcaaccagtaaacgtactggtgattgtcgggtcgtaataattaaattgttcatattaacctctcagaatcccgcgatcgggacttacccaacgggcgcgttgctttttaggcatcaacatgactcgtgtaaatgataccaatgtcgttgccaggctcagcatccagaaaataaccgggaaccaaataatccagaaaagcgatgaagtcagattatgctcatagcgattctcgatcatcaggctgacaataaattgcagtaaacataacgtacacaataatattccggcagtatgtgtcgcagcgatatgtgtcaattcaatatttaacggtacaccggcaagttggactgcgtaaataatgaaaccgaccaggcaggtgaaggcccatattgtcgtcaggcagtattcaaaaaacagcggccacattcgaaagttttctttgcgccacaaccttgtcatatttttgaggaatacttctgcaccgccctgagcccagcgcaggcgctgtttccacagcccttttaacgtttcaggcattaatatccagcacagtgcccgtggctcgtaaaaaatcgtccactgattcaactgcagcttccagctaatatcaatatcttcggtgatcatatcgtcactccagtaacccacttctgccagggcgctgcgacgaaatgcggcaataacaccggaaacggtaaatacgtttccatagatacgctgggttcgcttgatcaaaccaataattgaggaatactcgccaacctgaattttacccaccagggtagaacgtgttcgaatacgaggattaccggttacggcacccacacgcgggttgtacaacatcggttccacaatatatgccgccgcatcgcggtctaataacgcatcgccatcaatgcacaccagatattcacttttcgccgcggcagctccggttttaagcgcaatggctttcccctggttttgcgccagatgaatgacccgcaaatggggaatttgtgcagccatgcgatccaggatggcacgggttttatctgttgaaccgtcatttacggcaataacttcaatgttctcataacgctgtgctaaagcggcgtgtatggtttcctcaacgtttttctcctcattaaaacagggaatgataatggagatagacggattatctttcaactggggagctggtgcgttttctccccacggccagtggcgttcacgatagacccagaaatagacgccgccaacaatccacataatggacataaaaaacggccagaagaaaacgaacctcatcatcagttcaccagagtgaaagtacgctacgcataggggtatgcataacaccagacataatataaaaaacgatacgatgcgattaatcatttttcggataccaggctgttgaaaactcaggacgaataaggtctatttcaggttggttatgcagaaaattgtcgggataataaccatagtttttcactccattcagttgtaataggctcatccagtgagcgagttgttgcgaagaaatagcctgatgctgaccatttttctgccagttttgtgcctgtaattctaaaatagatttgtctttagcctgagggatgtttttaatttgattggtcaattgtattaaccattggtcagccgatttttctgcgacaccttccagataaggcatagccataatagcggtccagtcatagctttttaggaaatcagcataattctgtgcaaaccaggcttcactttcaggttgtattaccggaagtgcaaaaatatttcgtgcagttttaatatgtggaccgcgaatggcttttacgcgcgcactaagttctaaagtgaagtcagttaacgcacgacttttaaagcgggcccactgtttaaattgctccgggttttgtcgaatttcgctcagactcccgctaaagcctgcttgctgataagccgtgatagccggtgcactggcatcttcataatctgaaagcaaagcatcatcgtggaacaatatgccatcaaaagcagcatgtccggcaagatcttcatataacatgccaacttgtgctctgactctgtcatcgaaaggagagagacggtgatattgttcaggatgaatttgtgcttttttctcccctgttggtaagtattttactcgcgttaatgtgggatctaaatcccagcttaataccggcatccacgcatagatgtttacacctgagcgggtacgtaattgccaggcaacccgactaaaaatatctgctttcattggtagcaaacgatttggaaaccagacctctttgaccagcccatcaccatcgggatcagcaaatgcctgcaaatacacggttgatatttgcatatctttcacccgctgaattagcacatcaatattgcgatccatttgctggaggttttcgtcataaacgtaatcaagatcgatatgcattatccgttgtggtgatttttcctgtacggtaataatttgctgggcaaactcttttaatgagggattattggcgattaatacccgcggaatggaatccaattgcgacgcatttgccaaacctgattcaagggtgaagaacatgtcataaccgagtttttttaattcctctatcgctatgccattcgcttcgccataaggccaaacaaaaacgtgtggatttacctcaacctttgtacgcaggtattccgtcatttttacagcatccagacgaattctttcccggtattctgctgcggtttcataccgtgcgtggtcagtaaaatatgcacgatttacatatacaggcaataagctgccggtggcattagcctgaataccgtagtgagaattccatgtatgagaagcgagctcaacgagccgggaacgcgcaacttctcgcacttgttgccacgtggcaaaatattctcgatcgaccaactcatcgccaaattttacttgtttatccgctggcgtatcgacccaactgccgacgggggcccatacagcaggccactggaaggcctgaagaattgggaagacgcgggtataaaaactctggtagccgtcatcaaaagtcagcactacagctttttccggtagcggttttcctcctcgatgtgcttcacgaatttgagcaatactgaccggttgataaccgttctcgcgcagccaggcaaattgttcacgcagtgctgatgtccgcactgacataaaacgctggtcggcagcttcgtcttcaacgttatgccatgaaatcgctacaaaaccattatgcggccacggttgctcggcgagtaaagattcgcgatcctgtggcggtataaatgatgttcttgactggctaatgcacgcggtgagcataattatactcaccagcatcaggagatatttatttccattacgtaacatatttatccttaaaatctgaatgtcatatcgaattcaacgtataagttgtgttctctgtcaccgtcataaggtcgtttttcccagcgtagcgttgcgccagcatcaatcacgtcattccaactaatgcgttgcccgtagccgagttgggtgacgacatccgtgccataatgtttttgccaggaggcaccaacacctgcgctgaatatttgctcccagctattttcatagcttcgccataacaaatggcttgcctcaaatgccggaacaatatcgaacgtttttatagggttgtagtatggggtatcgtgttctgtattttgttcgtaatacagactgggtaggaaatcgacaatcaaatatggtgaagaccagatgcgttcctgaccctcaagtgagacttcatgacgctggttactgtcggaaaaatcagtgaaagcccaggagacaccgtacttacgccgctcattttgataccagcgaacataagcctgagcactgttgcctgtaacaccatttttcattgcccgtaatggaacgcggtgagagaggcgttccagttgcgaaccaatacgccagttatcattaaaatcataccagccagacaggcgcgcgccgggtttatgctcatgattgaaaacgcgttcagcgtactctgcctcgagccagatattacgtgaccgccactcaacacccgcaagccagtcgcgaacaatcccttttccttcgctaaattgtccatcggcataaccgaatccagcaaaaccgcgccagttatccttcagcggtggtgaataaacgatggtggttaagtcgacatcatgtttaccactatccgggccttcggcatcaattcctgttgagccagcgatacgaagctctgcaagattatgtacatcaaccgcacgttttaatcgtacaacgccgggatcttgcggttcacgttcgacaacatcgtgcgttaagacagctgcctgctgccattcttgtaacgttaatgctgtccaggcttgttcaacctccagattaatattacgtggctcgatcacttctgctttttttaattcattttctgctgcacgaggccaaccgcgggcttgtaacacactcgcgtaatcaatgcgcagtccctgatttcctggtgcgttataagcaagctctctggctgtcatttcagcctgaggaagatcattactatattttgctacggttgagagaaacgaatgcccctgtaaccaggtatcattcgggatgctcgtaggcgtgcccattaaccgaaggaaaggcggcgaagtattaatggtatgttgggtgacagttagcgcgcccggataattttcactctccaggtggctgtaaaagagatccgcaagttcttcatcggataaatccggggcaatggtctccttgtgataaaagagctcggtcattattgactgtgcttttttcggctgatgatctttgagataagccgatgcaacccaatattgcccccagggcggaataatttgccccgtcttttttaatcgctgatagtgagaaataacgtctttataacgatcgcgagttaataacgcgccaagatgatcaacctgaatacgctggtactgggcagtgcggtctgggttatcgtgccacagaatttctaatgcagcgtattgggcgagggcgcgatcggcaatggcataacgttcactttcactgcgcgtaggcataaacgacagtctgaccagttcggcatgaatatcagcgcgaatatctggcgttaaattggcatcgtcaatcgcggcagcaagttgattattacgtaatgcctgcacgtattctgtgggatattgttgcgtagatgcattttcaggtaatgactctgtcatcgcccgtaattcatcctgatgacgccccgccagtttatagatataggcttctgcgagtaaattggctttgtccggtgctccagagttaagctgcttaagtttaaccagcgcagtatcatagtgaccagcatctgccagggttaaaatttgtccccgttgataatccttattttgcggctccagagagagcgccttttgccacagtgtaagcgagttttgccattgttgcaggttacgataagcgacggcgacagctgcataaccacgcgctggtaattgctgatgacggtagcggttgtaaacggtaataacctgtttatcttgcccggcccataaggcaatctgtaaccagtcagcaatttggttattgctgagtgctgattttagtgcaaaccatgacaaagctggctgagtattacccttgcgagcttcaataatcaatgcatcataggcgttattaacagcactcttcgccgcgggactcgctgctaaaaatgcggcagtaagaagtttcaaagcccatttggttttcgggcacctttttctgctacttgaatacatcctgtattactccatgtattgccaaaatctctctctgtatctaattacaggtaactgaaaagaaagatatttttgcacctcataatccgttattaaacgcggaagagagacgtgaattgttgatgatgagaagaagaaatgatgagcagagtgtccatataaaatccttttctcgcccgaaaatccattccaatgatgaggatcttcaggaatacggcataaatcccaatgcctttttcaaaataaattaggattaaaataattaaatcagtaaattccgatgcatgatttcggatttttcgaaagtcctgatgaaaggctgcgctacggcactcacggatttaattgttattcctaatgtatctatgaattaatgttttataaggattttctataaccatttataagtattttcaagcctggcttgttgcaaacaatgtataaagcacttaggcaataataattacattcagcaactatcatcatcggtattgtttgtgggcggaatttcatattgacaacagtacagttcttatatctattaataatagaaagggatctacaacctacagattggtgtagctttatggaaaaagactatttgagaattagtagtactgtattagtgagcttattgtttgggcttgctttggttttggtgaatagttggtttaatcagccaggcgttgaggaagttgttccacgatcaacctatctgatggtaatgattgctttattttttatcgatactgttgcatttatttttatgcagttgtatttcatttatgaccgtaggcaattttcaaactgtgtacttagtttggcttttctgagttgtttgatttactttgttataaccgtcattatcattcagcaaattattgaggagcgtttgacaagcagtgttgtccaaaatgacattgcaatctattatttgtttcgtcagatgagtttgtgcatattaatatttctggcattggtgaataaagttagtgaaaacacaaaacagcgcaatttattttccaaaaaaatgactttgtgcataagtttgttttttgtttttggggggccgatagttgctcacatactttctagtcattatgagagctacaatttacacattgccgagttaaccaatgaaaatggtcaggtggtttggaaagcctcatatgttaccataatgattttcatgtggttaaccttgctttcggttaatctatactttaatggtttacgctatgatatctggaatggagtgacggtgattgctttttgtgccgtactgtacaatatctctctgttatttatgagcaggtatagcgtgtccacttggtatattagtcgcactattgaagtagtcagtaagttaaccgttatggtaatatttatgtgccatatattcagtgcgctacgagtaacaaagaacattgcacatcgcgatcccttaaccaatatatttaacagaaattatttttttaatgaactgacagttcaatcagcatcagcccaaaaaacgccttattgcgtcatgattatggatatcgaccacttcaaaaaagtcaacgacacctgggggcatccggttggcgatcaggtgataaaaacagtggtgaatatcattgggaaaagcatacgaccagatgaccttttagcgcgcgtcggcggcgaagagtttggcgtcttgctgacggacatcgatactgaacgtgcgaaagctttagcggaaaggattcgggaaaatgttgagcgtttaactggcgataatcctgaatacgctataccacaaaaagtgacgattagtattggcgctgttgtgactcaggaaaatgcgttaaacccaaatgagatctatcgactggctgataacgcactttacgaggcgaaagagaccgggcgtaataaggtggttgtgagggatgtggtgaatttttgtgagtcaccataaagcggcattttgatcctacccacgtaatatggacacaggcctaagcgaggttcttgttttcaaattgttccggactgaggccgccacaccaactgtgccgccgccaccgattgtaatcacattcgatataattaaacaccgttgcccgcattatttcccggctgataaagtgttctccatggatacattccactttcagcgaatgaaagaagctttccacgcaggcattatcgtagcagcaaccttttgcgctcatacttccacgcagattatgccgcttcagttgcgcctgataatctgctgaacagtactggcctccacggtccgtgtgaacgataacgttccggggcctcttacgccgccacagcgccatctgcagggcatcgcaggccagttgcgccgtcatgcgtggcgacattgaccagccaataacggcacgtgaccacaggtcaatgaccactgccagatacagccagccttcatctgtacgtaagtacgtgatgtctcctgcccacttctggttcgggccactggcgtaaaaatcctgctccaacagattttctgacacaggcaggccgtgtgcgcggtagctgaccgggctgaacttccgggaggcctttgccctcagtccctgacggcgcaggcttgccgccacggtttttacgttaaaggggtaaccctgagcacgcagttcatccgtcaggcgtggggcaccgtaacgctgttttgaccgggtaaaagccgcgaggacaacgctgtcgcagtgttggcggaactgctgacgcgtgcttatccttgtccgccgctgacaccacgtataccagccgctgcgggccacccggagcacgcggcacattgctttgatgctgaactcagcctgatgtttttcaataaagacatacttcatttcaggcgcttcgcgaagtatgtcgcggccttttggaggatagccagctcttcatcccgttctgccagctggcgtttgagacgtgcaatctcggtagacatctccagttcacgttcagaagacgtctgctgattttgctgtttactgcgccagttgtagagttgtgattcatacaggctgagttcacgggctgcggcagtaacaccgatgcgttcagcaagcttcagggcttcactgcgaaattcaggcgaatgctgtttacggggttttttactggttgatactgtttttgtcatgtgagtcacctctgactgagagtttactcacttagccgcgtgtccactattgctgggtaagatcagtgcctggcacacgcgtttgatggaagacggcgttcaggcaatgcgcgattatcttgccggactggatatcgcttcgccagagcatcaggttctgatgaacgtaacagcaaaaagcgaggtcgctccgtcaattatcaaagaaaatctctcattacacttaactcatacggtgaaatggactgaatctctcgatacatttctgaatatgccaaccccggtagctttccttgaaataagtaataagccctatttggggaatatgttaaatgattttgctggcgtggatcagcaacgagttatgcattgtcgtaaagcatttagtgatgcaaaggtattcaaatgattcctgattatttaacttttattcgctttcaggataaacgaaatctgatatacatttatgctattggacttattctgataggcttttattggaagaatgcagggtttacttttccatcagaggatattggtgtagttagtgggattctggctctggtgctgtataattttatttttgatctcaaggcgtactgggcttataaatgcgtcacgaagaatatcgatttttcgtggtttaagaaaaagcagaaccacaaaatagaattatttcttacacaacctctggtggcaggatttctgtcgttaatcatgttgagtgcaatgagttgggggctataccagcttctaccctcgttatatgcgctgttcctgatttcgttacttgggccgttggtcatctttctgctgtttcggatgatccgcaccagttatgtcaagcaggtcgctatttcagtagcgaaaaaagtaaaatataaaagtctgactcgctatgtgctgctttcggtgtgcatctcaacggttgttaacctgcttactatcagcccgttgcgtaacagtgattcttttgtgacagaggggcagtggttaacgtttaaatcgataattgcattgctcattctttgtggcgtagtgttggcgattaatctgttttttctgcgcttctccaagcggtacgcttttctgggcaggctttttttgcaggaaatcgatctgtttttctccagtgaaaatgcgttgtcgaccttttttgccaagccgctttggcttcggttattcatattgctggttattgaagtgatgtggattacgctggtgtcggtattggcaacgcttgtagaatggcggatttggtttgaagcctattttttactctgctatgtaccgtgcttaatttactattttttctattgtcgattcctctggcataacgattttatgatggcatgtgacatgtatttccgttgggggcattttaataagtgaggaagtgataggaagtgaccagataatacatatatgttctgtactctcttgcgcattttgattgttgactgagtaaccagacagttgatgtgcacgatttcccctcgccctaacagacgtgggcgggggcacccggtgtgtgcaatatacgaaaaaaaagcccgtactttcgtacgagctcttctttaaatatggcggtgagggggggattaatccgtatcttcgagtgcccacacagattgtctgataaattgttaaagagcagttgcgacgcgctttagcgcactgtcgcgaggtggcgtatattacgctttcctctttcagagtcaaccctgaatttcaggatttttctcttcaaccgaaccggctgtttgtgtgaagtgattcacatccgccgtgtcgatggaggcgcattatagggagtcgtctcaggaagacaagtggaaaaatgcatttttatttcaatcgctcatcttttaatcattatgccggtttttgctgcttttttatcgcttgcggcaggtctgccaggctatttaacacccaatccgccgcgttttctgcttcaggcgtaataggtttacccgtacgcaccagcacttttgttcccacgttcgccgcagccgctgcctgcatatcttctaatttatcgcccaccatataagaagcggccatatcaatatgcaaataatcgcgtgctgacaaaagcatccccggatgtggtttacggcagtcgcagacctggcgaaactcttcaacactaccctgcggatgatgcgggcaataatagataccatccagatcgacatctcggtccgccagcgaccagtccatccactcggtcagcgtttcaaactgtgcttcggtaaatttaccgcgagcaatgccagactggttggttactaccaccagcgcaaaccccattttttttagctcgcgcatggcgtcaataacaccgtcgataaattcaaagttgtcgatctcatggacatagccgtgatcgacattaatggtgccatcacggtcaagaaaaattgcgggtacgctcttcgccaccttttatagctccttaataaggcatgtgacgctagtatcgcatgtttcgacctgcaagaaagtgctcttcgcataaacctgattgatttagacgtctggatgccttaacatccatttcattgacggcgttgcccgtttcaggcattcgaaatgccacgactaacttaatgacgataataaataatcaatgataaaactttcgaatatcaccaaagtgttccaccagggcacccgcaccatccaggcgttgaacaacgtcagcctgcatgtgccagctggacaaatttatggcgttatcggtgcctcaggcgcgggtaagagtacgcttatacgttgtgtaaacctgctggagcgcccaaccgagggtagcgtgctggtcgatggccaggagctgaccacgctgtcagaatctgagttgaccaaagctcgccgccagattggtatgattttccagcattttaacctgctctcttcgcgtactgtttttggcaacgtggctctgccgctggagctggacaacacaccgaaagacgagatcaaacgtcgcgtgacggaattgctgtcattggttggtcttggcgataagcatgatagctacccgtcgaatctttccggtgggcagaaacaacgtgtggcgattgcccgtgcattagccagcaatcccaaagtattgctgtgtgatgaagccaccagcgcgctggacccggcaacgacacgttctattctcgaactgctgaaagacatcaaccgccgtctgggtttgacgattctgttgatcacccacgaaatggacgttgtgaagcgtatttgtgattgcgtggcggtcatcagcaacggcgaactgatcgagcaggacacggtaagtgaagtgttctcacatccgaaaacgccgctggcgcagaagtttattcagtctaccctgcatctggatatcccggaagattaccaggaacgtctgcaagcggagccattcactgactgcgtgccgatgttgcgtctggagtttaccggtcaatcggtcgatgccccactgctttctgaaaccgcgcgtcgtttcaacgtcaacaacaacattattagcgcgcagatggattacgccggtggcgttaagttcggcatcatgctgactgaaatgcacggcacacaacaagatacgcaagccgccattgcctggctgcaggaacaccatgtaaaagtagaggtactgggttatgtctgagccgatgatgtggctgctggttcgtggcgtatgggaaacgctggcaatgaccttcgtatccggattttttggctttgtgattggtctgccggttggcgttctgctttatgtcacgcgtccggggcaaattattgctaacgcgaagctgtatcgtaccgtttctgcaattgtgaacattttccgttccatcccgttcattatcttgctggtatggatgattccgtttacccgagttattgtcggtacatcgattggtttgcaggcagcgattgttccgttaaccgttggcgcagcgccgtttattgcccgtatggtcgagaacgctcttctggagatcccaaccgggttaattgaagcttcccgcgcaatgggtgccacgccaatgcagatcgtccgtaaagtgctgttaccggaagcgttgccgggtctggtgaatgcggcaactatcaccctgattaccctagtcggttattccgcgatgggtggtgcagtcggtgccggtggtttaggtcagattggctatcagtatggctacatcggctacaacgcgacggtgatgaatacggtactggtattgctggtcattctggtttatttaattcagttcgcaggcgaccgcatcgtccgggctgtcactcgcaagtaacgttcaacacaacataaataattgaagaaggaataaggtatggcgttcaaattcaaaacctttgcggcagtgggagccctgattggatcactggcactggtaggctgcggtcaggatgaaaaagatccaaaccacattaaagtcggcgtgattgttggtgccgaacagcaggttgcagaagtcgcgcagaaagttgcgaaagacaaatatggcctggacgttgagctggtaaccttcaacgactatgttctgccaaacgaagcattgagcaaaggcgatatcgacgccaacgccttccagcataaaccgtaccttgatcagcaactgaaagatcgtggctacaaactggtcgcagtaggcaacacttttgtttatccgattgctggttactccaagaaaatcaaatcactggatgaactgcaggatggttcgcaggttgccgtgccaaacgacccaactaaccttggtcgttcactgctgctgctgcaaaaagtgggcttgatcaaactgaaagatggcgttggcctgctgccgaccgttcttgatgttgttgagaaccccaaaaatctgaaaattgttgaactggaagcaccgcaactgccgcgttctctggacgacgcgcaaatcgctctggcagttatcaataccacctatgccagccagattggcctgactccggcgaaagacggtatctttgttgaagataaagagtccccgtacgtaaacctgatcgtgacgcgtgaagataacaaagacgccgagaacgtgaagaaattcgtccaggcttatcagtctgacgaagtttacgaagcagcaaacaaagtgtttaacggcggagctgttaaaggctggtaatttttaggctgtttccacaatttgtaatatcattcaggacgggcgcttgcccgtcttgtcatttttacaagctcctgattcaatattgacgttttgatcatacattgaggaaatactatgcgtgctttaccgatctgtttagtagcactcatgctaagcggctgttccatgttaagcagatcccctgtcgaacccgttcaaagcactgcaccccagccgaaagcggagcctgcaaaaccgaaagcgccgcgcgccacgccggtccgaatttataccaatgcagaagaattagtcggcaaaccgttccgcgatctcggtgaagtcagtggcgactcttgccaggcctctaatcaggactctccgccgagcattccaaccgcacgtaagcggatgcaaatcaacgcctctaaaatgaaagccaatgctgtattactgcatagctgcgaagtcaccagcggtacgccaggctgctatcgtcaggctgtatgtatcggttctgcgcttaacattacggcgaaatgagcagtttccagttcgagcaaataggcgttattcgctcgccctataaagaaaagttcgccgttccgcgccagccaggtctggtaaaaagcgccaacggcgaactgcatctcattgctccctacaaccaggccgacgccgttcgcggcctggaagcgttcagccatttatggatccttttcgtctttcatcaaacgatggaaggcggctggcgtccgactgtgcgtccaccgcgcctcggcggtaacgccagaatgggggttttcgcaacacgctctactttccgccctaacccaattggcatgtcgctggtagagctgaaagaggttgtttgccataaagacagcgtgattctgaagctcggcagtctggatctggtcgatggtacgccggtagtggatatcaaaccgtatctcccctttgccgaatcgcttcccgatgccagtgccagctatgcgcaaagtgcgccagctgcagagatggcggtgagttttaccgcagaggtcgaaaagcagcttttgacgctggagaagcgttatccgcagttaacgctgtttatccgcgaagtactggcgcaggacccgcgcccggcctatcgtaaaggtgaggaaacgggcaaaacctatgccgtctggctgcatgattttaacgttcgctggcgcgtcaccgacgcaggttttgaagtctttgcgctggaaccgcgttaaattcacgcccttctcttttgacatttcttttgcactggtaaactaaatcactttttttgtcccaggctcgccttgagcctgttctaccttccaactggaaccgtaacaacatgcgtactagccaatacctgctctccactctcaaggagacacctgccgacgccgaggtgatcagccatcagctgatgctgcgcgccgggatgatccgcaagctggcctccgggttatatacctggctgccgaccggcgtgcgcgttctgaaaaaagtcgaaaacatcgtgcgtgaagagatgaacaacgccggtgcaatcgaggtgtcgatgccggtggttcagccagccgatttgtggcaagagagtggtcgttgggaacagtacggtccggaactgctgcgttttgttgaccgtggcgagcgtccgttcgtactcggcccaactcatgaagaagttatcactgacctgattcgtaacgagcttagctcttacaaacagctgccgctgaacttctatcagatccagaccaagttccgcgacgaagtgcgtccgcgtttcggcgtcatgcgttcccgcgaattcctgatgaaagatgcttactctttccatacttctcaggaatccctgcaggaaacctacgatgcaatgtatgcggcctacagcaaaatcttcagccgcatggggctggatttccgcgccgtacaagccgacaccggttctataggcggcagcgcctctcacgaattccaggtgctggcgcagagcggtgaagacgatgtggtcttctccgacacctctgactatgcagcgaacattgaactggcagaagctatcgcgccgaaagaaccgcgcgctgctgctacccaggaaatgacgctggttgatacgccgaacgcgaaaaccatcgcggaactggttgaacagttcaatctgccgattgagaaaacggttaagactctgctggttaaagcggttgaaggcagcagcttcccgctggttgcgctgctggtgcgcggtgatcacgagctgaacgaagttaaagcagaaaaactgccgcaggttgcaagcccgctgactttcgcgactgaagaagaaattcgtgccgtggttaaagccggtccgggttcactgggtccggtaaacatgccgattccggtggtgattgaccgtaccgttgcggcgatgagtgatttcgctgctggtgctaacatcgatggtaaacactacttcggtatcaactgggatcgcgatgtcgctaccccggaaattgctgatatccgcaacgtggtggcgggcgatccaagcccggatggtcagggtacgctgctgatcaaacgtggtatcgaagttggtcacatcttccagctgggtaccaagtactccgaagcactgaaagcctccgtacagggtgaagatggccgtaaccaaatcctgacgatgggttgctacggtatcggggtaacgcgtgtagtagctgcggcgattgagcagaactacgacgaacgcggcatcgtatggcctgacgcgatcgcaccgttccaggtggcgattctgccgatgaacatgcacaaatccttccgcgtacaggagcttgctgagaaactgtacagcgaactgcgtgcacaaggtatcgaagtgctgctggatgaccgaaaagaacgtccgggcgtgatgtttgccgatatggaactgatcggtattccgcacactattgtgctgggcgaccgtaaccttgacaacgacgatattgaatataaatatcgtcgcaacggcgagaaacagctaattaagactggtgacatcgtcgattatctggtgaaacagattaaaggctgatgccagaaagggccctgaatttcagggcccttttttacatggattgtataaaatggataaaccaaaggcgtactaccgcctgcttctccccagctttcttttactttcggcctgtaccgttgatatcagccagccagactcatcagccacagcggtagatgccgaggcgaaaacatgggctgtcaaattccagcatcaaagctctttcaccgaacaatcaataaaagaaataaccgagcctgatctcaaacccggcgatttgctgttctcctcaagccttggggtaacctcatttggaatccgcgttttcagcacttcctctgtgagtcacgttgcaatctatctgggtgataataacgttgcagaagcgacaggcgctggcgtccagattgtttccctgaaaaaagccatgaagcacagtgataagcttttcgttttacgagtcccggaccttactccgcaacaagccacagaaatcaccgcgttcgccaacaaaatcaaagatagcgggtataactatcgcggcattgtcgagttcattccctttatggtgacccgccagatgtgctcactgaatcctttttccgcagattttcgccaacagtgcgtcagcggcctggcgaaagcgcagttaagcagtgtgggcgaaggagacaaaaagtcgtggttttgttcggaatttgtcactgatgcatttgccaaagccgggcatccgcttacgctggcgcaatcaggctggattagccctgccgatctgatgcatatgcgtactggcgatgtctctgcgtttaagccagaaacgcagttacagtatgttgggcacctgaagcctgggatttatatcaaggcgggtcgctttgttggtttgacccggtgataaagtaaatgccttatccgccttaaggtatgaggggggttgtaggcatgataagacgcgccagcgtcgcatcaggcgttgagcaccattgccggatgcggcgtaaacgccttatccggcctacaaaaaacgtgcaaattcaaaatgttgaaatatatccttctggcctgttttgcgtttgtttctgtctcaagacgggttactgccccaaactactgcaatcctggttggggtaaaatttccctgccgtatcgggtgccaatactttagtcggcgcaccggtatccggattaccctcaagcgtaaagtgaccttctactgacagtaacaccggtttttcactgtgaccgcgcgcagccaggtagctacgctccagctctgcgttattcgctaccatgaaacgttttccggtcgcgcaatcagtgaaggtcgccgcatcagccatataaaaatacatgccccgcagggtcatcggcgtcataggtaaactggattgtgccgcttccagcgtatagttgaactgcgattcaatcggattgccttcacgatcgagcatctccagcgcatcgcctttcgcccgataatatgacttttcacctttgctgtcggttaataccagcttgtcagcggttcgcgcccatgtaccgtaggaagcgaaggaggaaggttcttcacgagcaccgagataacgctcattcatcacccatgttccgtctttttcgaggaacagagaggtttcgattccttcgcaatcggcacacggcagcacgccgcgccaactttgcggcatcggtttcagttcggcagcctgcgccggagaaagcgtatcgacttcggcccgattattacatcccatcagagtaaaaaggctgattacagccatcgctgtcactatcgcttttttcaccatccattccttctttttattcccgaccgctgcgcactttgccgcgcatcgccttcacgcttgatttttgtgctttcgatgccagcctgcgctctttcgatgcacgggtgggccgcgtgggtcgtcgggcttttttttctgttgttaattctttaatcatagccaccagccgggccagagctgcttcgcggttcagttcctgactgcggtattcctgtgccttaatgacaatcacgccatcactgctgatcaaatgatggctggcggcgagcagacgctctttgtaatactctggcaggctggacgcccgaatgtcaaaacgcagatgaatagccgttgaggtcttattaacatgctgcccgcccgcgccctgcgcacgaatggcggtgatctcaagctcaccatcgggaatagcaacatgtcgggaaatcacaatcatgaaggttgttgccaggcggttaagttcacttccagattattcttatcatccgataaccagatcacgccatcctgaatcgttgcctgcagcgtcatggtacgatcggcaaaggcgcttactttcgccagttgttcatcgtccagataccagacggaaagattggcaaactgcacacatttgctctgattttgctgccaccagatttgcgccgcccgactattataggtaaacagcgccacttctgcggcctgggtgcaggctttcttaatccgccgctcatccggcagccccagctcaatccacaaatcaatgcccaggtgatcgttacgcagccacgcttccggctcatcatcggcacacaaaccacgggtaaattgcagacgttcatcagcatatttcagccacgccagcaagcgcagcatcatacgctcctgggtttctgaaggatggcgcgccagcgtcagagaggcatcgagaaactggttgcggtcgagatcggccacattaaccgtcgctttataaattgtcgctttaagcgccataagaaaactcctttcgaatcaggaggccattgtaacggaatacgtgcagttgcggcgctgatattgcagaaatgagtgtggtatagtcaccttgcgaaacagagtttatcttcgtaggcttagacttgcatccacggttaagtcagagtgctgacaggagggcatgtggaaaaatattgtgagttaatacgcaagcggtacgcggaaatcgccagcggagacttaggatacgttccggacgcgctgggctgcgttttgaaagtgctgaatgaaatggctgccgacgacgccctttctgaggctgtcagggaaaaagcagcatacgctgcggcaaacttactggtgagcgattatgtcaatgaatgatacgtatcaaccaatcaattgtgatgattacgataatcttgagctcgcctgccagcatcatttaatgctgacacttgagctgaaagatggcgaaaaattgcaggcaaaagccagtgatttagtctcccgcaaaaatgtggagtacctggtcgtcgaggccgctggcgaaacccgcgagctgcgtctggataaaattaccagctttagccacccggaaatcggtacggtggtggtaagcgaatcctgattgactttcgccggatgcgacgtttgatgcgtcttatccggctttcacttaactaagcgttttctgccagacaaaacttacgccattctcaccttcagccacaccttcttgcgtcacaaatacccctgccgccgcaatcagcgtttcgccataaaacagcagtggcgtggtgtcacgtagccacggcggcacgcccagctcttgccagattttctttagcttacgtccgccgttacgcccgacaatatgcagcaatcctggcgctttgaaacgcacgctgaccgcttcgtctgcacgcggagggcgaatatcgcctcccgcattaagctgtacacttcccagccccgccggtaattccagcggttgaagccacgtctgccacggcacaatgttttcgctttgcccggtgacggatttaatccaccacagttgcgactgatagcgtcggatttcaaacgcgcccaaacgtaaacagggtgaggcatcttcccgcgccagcgccacttcctgccagatcctcaccaacgcgtcgcgggaaggcatcggtgcattctgccctgccagccagcggcggataatcgccgcgcggcgggcatcactcatcgccagcattggcacaatctgcagcgtcccctgcggcgattgacagtgtgctaaatcatctgccagcagttcatccagcaggctctcttgttcagcacaaagtgcggcgctgcgggccgttgcttcggcaaaatgcggccaacgctgctgcaataacggcactacgcgcaggcgcagaaagttacgatcgtatgagtcgtcctgattactttcgtcttcaatccagcgtaaatcatactgacgcgcccactgcaccagttccccccgcgtgcgggcgagcaacgggcgaataagccgcgttccggcaaactccgagacttccgccatagccgaaagcccggcagggccactgccgcgttttagcgccagcagaaaggtttcacattgatcgtcgagatgttgcgcggtgaccagcacttcaccgggcaacaaggtgcgggcaaatgcctgataacgtgcctgccgcgcctgggcctcaatgcccagtccttcttgcgcaagttgtacgcgttcgaccaccagcggcacctgccactgttggcagacgttttcgcaatgcgtaacccaggcatcggcattggcacttaaaccgtgatgcacatgaatagcgcgcagagcgacacccggattttccgtccgccactgcaccaactgatgcagcagaacggtggagtcaagcccgccgctaaaggccaccagaatctggcgtgaggtgagaagttgtctattgagcgtgagtgtcatgatggtgcgattttacagtagcaatgcccggcacgttaccgggcaaatgcggcgatgacaagccttactgctcatacagttccaacggcagcccgtccggatcgttaaagaaggtgaagcgtttttgcgtgtatggatcgacacggatggtttcacacttcacgttatggctttcaaggtgcgccactgccgcatcgatgtcatcaacgctaaaagccagatgacgcagaccgcaagcttccggtcggctgggtcgttccggcgggaacggaaatgagaaaagctcaatcacatattgcccattaagcgccaaatcccctttccatgagtcgcgcgcttcgcgatagacttcgctttgcagcgtgaaaccaagaatatcgcagtagaaagctttgctcaccgcataatccgtcgcaataatcgcaatatggtgaacctgttttaaacccagcataacgtctcctttatttgttaacagcacgttactcgcccggaagccgctctggcaagttatcccgccatttttaggactcgtacgcggtaaacgccatcttcgtcctgtttcgcgccgtgaatatccgtttcaaaaccggggtaatgttgcccgacggaacaaagcatcagtagaaaatcgagtactgtgcggctctctttggtcagcatttctccaggcatcaacagcggtacgcccggtggataaggcaggatcatatttgccgatactctaccgaccagttgttccagcgcaatggtttctacttcgcctttaatttgtcgttgccatgcctgatgtggcgtcatgatcatctccggcaaagtatcgaatgcccgcaacatcaaaccgggaagatcgtgtttacgaatcagcttatggatcccttgtgccagatcctgaatacgcatattgcggtagaaatcgggatcttctgcatagagatcgggtagcatatttttgatccgcaggttgagatcgtaagagcgtttgaattccgtcaacccacgcaataatcccattgctttggttttatcgatgccaatactaaagagaaacagcaggttataagggccggttttctctactacgatcccacgttcgtcgaggaattttgctaccagcgccgccgggatcccctcctcgctcatattgccctgctcgtccatccccggtgtcaaaatagtgactttaaccggatcgagaaacatatgatcggcatccgcatcgttaaagccgtgccactgttcgccaggcgcaacgggccagcattcggcttcatccacctgcggcggttgccagatatcgaaaaaccaaccgtcagactcttcccgcagccgctggacctctttgcgaaaatgcagagctcgttctactgaacggttaatcagccgtttgcccggattaccacgcagcatcgccgccgccgtctcaaccgaagcaacaatgggataactgggcgaggtggtggtatgcatcataaaggcttcgttaaaggcctcttcgtcatactcgcctttaatgtggatcagcgaagcctgcgataacgccgccagcattttgtgggtcgattgcgtttcgaagatcacttttcccgcaacacgctcgccgctcataccacttttaccctggtagatcggatgaaaatgggtgtacggcacccaggcagaatcgaagtgaatcgacgggatatccagcgtctgtttgatccagtcggtgttgtagagcaagccatcataggtggagttggtgatcaccgcatgaaccggccattgtgcttgcgtggtagcagcgactttctcttcgatgctgtcgcgagtaaattcacggcgcgggatcccaccaagaatccccaacgcattacgcgtcggtttcagccagactggcactacatcgttcatcatcaacagatgcgccagcgatttatgacaattgcggtcgatcaacagcgtactgccggatggcgcggcgtacatacccacaattttgttcgacgtcgatgttccgttggtaacgatataactctgttccgcgccaaaagtccgcgcgatgtactcttccgcttccaggtgtggcccggtgtggtcgagcaacgaaccaagctcggtgaccgaaatagagacatcagccttaagagtattcccgccgaaaaaatcataaaacagacagccaaccgggcttttttgatatgcggtgccgcccatatgccccggcgtacaaaaggtgtacttccgctctttgacgtaggtaaacaaggctttcgtgaacggcggtgtaatgttatcaagatattcgtcggtgtactgacgcatacgaatggcgatatcttccgcctgccccagcgcatattcaaaaaaccagagcgccatccgcatatcctgcacgctgacatccatcgtcgagtgggtgttgatgaaggcataaagcgggagatattcattaagctgattgatatcgctacataaatcgagactgtactcatcccagtcaaaaatcacgccgcaaattcgagggttatgttcgataaatttcagcaaatcaacgctgttttgtggccagataatctgaaagccttgcgccaccagcgccgactccagttctttgatgggctcatctttataaaagacgccatgcggtcccataatggcaatgatgttcatgtgttcctcctggaaaatccttccttaatcatagcctgctcaaaccgtggcgataaaaaagggccaccgaagtgaccctttttcagaacttttgcgaattacgcgtaaccgtagctcatcaggcgctgataacgacgattttttaaatcttcagtgcttaacacgtcgagatcggccagatccgccagcagttgcgctttcaacgatgccgccatcgcttccgggttacggtgagcaccacccagtggttccgggatgatggagtcgatcagtttcagttctttcagacgcggagcaatgatacccatcgcttcagccgccagcggcgctttgtcggcgctcttccacagaatggacgcacaaccttccggcgagataacggaataggtgctgtattgcagcatattcactttatcgcccacgccaatcgccagcgcaccgccagaaccaccttcaccgataaccgtacaaactaccggtacgccgaggcgagacatttcacgcaggttgcgtgcaatggcttcagactgaccacgctcttctgcgcccacgccaggataagcccccggggtgtcgataaaggtgatgataggcatcttaaagcgttcagccatttgcatcagacgcagtgctttgcggtaaccttctggcgctggcataccaaagttacggcgaattttttctttggtttcacgacctttttgatgaccaatgatcatcaccggacgaccatcgagacgggcgataccaccgacgatagctttatcgtctgcatacgcgcggtcgccagccagttcgtcaaattcatcaaatgccaggcgaacgtaatccagggtataaggacgctgtggatggcgtgccagttgcgcaatctgccatgcaccgagatcggcgaagattttacgtgtcagttctacgcttttttcacgcagacgatgcacttcttcatcgatgttaatatccagtttctcatcctgacggctaaccgcagtcagagaatcgattttcgcttccagctctgcaatcggctgttcaaaatcaaggaaattcagactcatagtattcctgtattagtcaaactccagttccacctgctccgaaccaatgaggccacggagatcgtttaataaacgatcgctcggagagacacgccacgtcgcgccaaaacgcaaccgcgcgcgtgcatccgccctctgatagtagagatgtactggaattgtcccagagcggtggggttccagagactgacggagtcggtttaaaagctggtcatcaatttgcctgtccgtcagcgagatagcaagcccgcgagcatatttttcccgggcttcgtcaatatccatcacttcgcgagcggtcattttaagcccaccgctgaagtcatcaaagctgacctgtccgctgacgataagtatgcggtctttttccagcaattgctggtatttatccagggcgtcagtaaacaacatcacttccagccgcccggaacggtcatccagcgtgcagataccgatacgattgccgcgcttggtgaccataacccgcgcggcaacaacgagccccgcagccgtgatgactttaccacgttctgtcgggtgcatgtctttcagccttacgcctccgacataacgctcaatctcttttaaatactggttgatagggtgtccggtcaggtacaggcctaacgtttcacgttccccatctaataccacctgctccggccacggttggcagctggcgtaggattgttcaatttgttccggctcttcggccagcacgccgaacatatcggcctgaccgatagcttccgctttcgcgtgttgatctgccgcttttaacgcatcgcccagcgagttcatcagcgctgcgcgatgtggcccaagacggtcaaacgccccggacatgatcagtttttccagcacgcgacggttcaactttttggtgtcggtacgggcgcagagatcaaacagttcgcggaagtagccgcctttattacgggcttcgatgatggcctcaatcggaccttcaccgacccctttgatcgcgccaataccatacacgatttcgccgtcgtcgttgacgtggaaatggtaaagaccggagtttatatctggtggcaggattttcagccccatccgccagcactcatccaccagacccaccaccttctcggtgttgtccatatcggcggtcattaccgccgccataaactccgcaggatagtgcgctttcagccataacgtttgatatgacaccaaagcataggccgcagagtgcgatttgttaaatccgtaaccagcgaatttctccaccaggtcgaagattttcatcgccagttcagcgttgattccgttcttttctgcaccttcagcaaatacagaacgttgcttagccatctcttccggctttttcttacccatcgcacgacgcagcatatccgcgccaccgagggtataaccagaaagcacctgcgcaatctgcatgacctgttcctgatacaggataatgccgtaggttggctccagtaccggtttcaggctttcatgctgccactgtacgtccggataggagatctcttcacgaccatgtttacggtcgataaagttatccaccatccctgattgcaacggaccggggcggaacagtgccactagggcgatcatatcttcgaagcagtcaggttgtagacgcttgatcaggtccttcatgccgcgcgattcaagctggaataccgccgtggtttccgagcgttgcagcatgtcgaagcttttcttatcatccagcgggatcgcagcgatatccagcggcggctcgccattcttcgcccgccgcttgttgatcatctccagcgcccagttgatgatggtgagcgtacgcaaaccaaggaagtcgaacttcaccagtccggcgtattcaacgtcgcttttatcaaactgggtgaccggatgtttgccctcttcatcgcagtaaagcggcgcaaaatcggtaattttggtcggcgcgataaccaccccaccggcgtgcttaccggcgttacgggtgaccccttccagtttgcgcgccatgtcgatcagcgccttaacttcttcatccgcttcgtagatttccggcagctgcggctcggcttcaaacgctttcgccagcgtcatccccggatcgggcgggatcagtttcgagatacgatcgacaaagccgtacggatgccccagcacgcggcctacgtcgcggatcaccgctttcgccgccattgtaccgaaggtgatgatctgcgataccgcatcacgaccgtacatgtccgctacgtgctcgataacctgatcgcgtttctccatacagaagtcaacgtcgaagtcaggcatggagacacgttccgggttaaggaaacgttcgaacagcaggtcaaattccagcggatcgaggtcggtgattttcagcgcgtaggccaccagtgaacccgcaccggagccacggcctggccctaccggtacgccgttatctttcgaccactggataaattccataacgatgaggaagtagcccgggaagcccatctggttgataacctgaagttcagtctccagacgttcgtcatattccgggcggcgcttaagacgttcttcctcatcagggaataaaaaggccagacgctcttccaggccctcttttgcacgcttgaccagataatcttcggtgctcatgtccccggtcgggaactgcggcaggaagtattcaccaagacgcacggttacgttacagcgtttggcgatctcaacggtgttggcaagggcttcggggatgtcggcaaacagctcacacatctcctcttcgctacgcatatattgctgcggcgaatagttacgcgggcgtttaggatcgtcgagggtaaagccgtcgtggatcgcgacgcggatttcgtgtgcgtcaaagtcgctgctgtcgataaagcgcacgtcgttggtcgccacgacgggcaaaccgcgcgcttccgccagttccaccgccgcgtgcagatagctttcttcatccggcctgccggtgcggatcagctcgagaaaatagcgatccgggaagtgttcttcataaaacgcgacacactcatctaccagcgcgctgttaccacgcaaaagactgcgtccgacgtcgcccatgcgtccgccggaaagaaggatcaacccttcgtttaattcgataagccagtcgcgatcgatgatcggcccggcggcaccgtacccgcgctgatacgcttttgagatcagcaacgtcagattctgatagccggtattgttcgccgccagtaccgtcaggtgggttaactcatcacccagcaggtcgcactggacgttaaaatctgccccgacgataggcttaatccctgcgccatgtcccgctccgtagaacttcaccagaccacaaaggttggtgaaatcggtgatcgccagtgctggcatacccaacgccgccgccttttttaccaacggtgcggttttggccaggccatcgatcatcgagtagtcgctgtgcacccgcaggtgtacgaaacgtggttcagacatcttcagattccggtttacttaatctcgacacaagaatcaggacgcaagtcccagtgcgcgtttgacaggcccaaagctgcgccgatggtgttcggtcgcgccgtgttcagccagtttttccagatgaaaagcggttgggtaccctttgtgttgggcaaaaccatattgcgggaaaacaatatccagcgccgccatttcggcgtcacgcgtcactttcgccaggatagacgcggcactgatttccggtacgcggctatcgcctttcaccacagccatcgcaggcatcggtaatttcgggcagcggttaccatcaatcaacacatattccggcgcaatatgcagcccagcgacggcacgctgcatcgccagcatggtcgcatgaagaatgttcagctcgtcgatttcgtggggttccgcgcggcccagactccagctcaacgctttctctttgatctcttcatagagcgccagacggcgtttttcgctcagctttttggaatcattcagcccggcaatcgggcgcgccgggtcaaggatcaccgcagcggtgacgaccgcgccaactaacggcccgcgtccgacttcatccacacccgcaaccagctgcgtgtgcggataaacaaattcgatcattgtgctaactccagaacggcttgtgccgcctgctcatcggcattgcagcggatctgctgatgcagttcacggaaggtatcgtgcatcgcgtggctggttttcccgttcgccaacagcggtaacagcgccgcagccagtttttgcggctcacactcttcctgcaataattctttgactaactctctgcccgccagcagatttggcagcgagacataatcagttttcaccagccgcttcgccaaccagaaggtaaaaggcttcatgcgatatcccaccaccatcgggcatttcgccagcatacactccagggctgccgtacccgacgccagtagcgccgcatcgctggcgaccatcgcctcacggcccatcccatccagcaaatgaactgaaaggtctggcgcgacttcagctttgatgcgttcaaactgctcgcggcgtttggcattcaccagtggcaccacgatttcgagatccggatatgtctggcgcaaaagctgggccgttttcaggaaatcggcactaagcatttcaacttctgcaccacggctccccggtagcaacgccaggcagtgggcatcgtgagggatccccagcacatcacgggcggcatttttatctggatctaatggcatggcatcagccatggtatgaccgataaagcggcacggtacgttgtatttgtcataaaacgctttttcgaaaggcagaaatgcgagcaccagatcggtggctctgcctattttgaaaacacgtttctgtcgccacgcccagactgacggactgacgtaatgaatggttttgataccctgctttttgaggttaccttcaagagtaatattgaagtcaggcgcatcaataccaacaaaaacatctggcttcagttcgccaaaacgctttgtcagatcggcacgaatatgcagtaagcgacgcagacgaccgagcacttcaacaatgcccatcaccgccagttcttccatttcgtaccaggcttcgcagccttcagcctgcattcgtggcccggcaacaccaacaaagcgggcgttgggcacatgttctttcagagcgcggattaaaccggcccccaggatatcgccggaggtttctccggcgaccagggcaatcgttaatggacgctgttcagtcattaacgaatcagaccgcgcgttgagcgtgcaaagaaatcggtaaaggctttcacttccggatatgtttccgccagttcagcaatttccggtttcacttcatcgagcgttttaccgctacgataaatcagcttatacgcattgcggatagcggtaatcgcctcacggctgaatccgcggcgcttcagcccttcgatattgacaccgaacggcgttgcgtggttaccctgcgcaatgacataaggagggacgtcctgcgccacaccggagcagccgccaaccatcacgtgcgcaccaatgatgcagaactgatggactgcggtcatgccgccgatgatcgcgaagtcgtcaaccgatacgtgacccgccagcgttgcgttgttggcgagaatacagcggttacctaccgtacaatcgtgcgcaatgtgcgcgttgatcatcagtaagttgtcgctgcccaccttcgtcaatccaccgccctggactgtgccacgatgaatggtgacgctttcgcgaatgcggttacgatcgccgatttccacacgggtcggttcgccagcatatttcagatcctggttaacttcgccgatggaggcgaactgataaatctcattatcgcggccaattttagtatgaccattcacgacaacgtgagatttcagtacggtaccctcaccaatttcgacatggggtccaacgatacaaaaaggaccaatgtgtgcgttcgcgccaattgacgcgccctcttccacaatggcggttggatgcacaaaggcggatttatcaatcacgtatcaggcctcccggctacgagcacacatcatcgttgcttcgcaaactactttaccatcgaccagagcaacccctttaaaacgggtcaggccgcggcgcgttttttcgaaagtgacttccatgatcatttgatcgccaggcacgaccgggcgcttgaagcgcgcttcgtcaataccagcgaagtagtacagctcacccggttccagttttcctacgcttttaaacgccagaatacctgttgcctgtgccattgcttccagaatcagcacacccgggaaaatcggttttccagggaaatggccctggaagaatggctcattgacagagacattttttactgcgcgcagaaaacgaccttcttcaaaatccagcacgcgatccaccagtaagaacgggaaacggtgcggcagaagttctaaaatctcttcaatctgcagagtatgagtgttagtagtcaagatactcttcctgtcaaaatataagaaacgacaataataacacggcctgccgcaatcgtaagaatgagacaggccgtaaagtttggcgaacaaaagatggaacgttagtcttgttgattaaccttgcgctcaagcgatttcagacgcttgctcatgtcatcaatgttcatcaccagtgcagcggttttgcgccagactttgttgggttgcagcggaatgcctgaggaatagacgcctggttcagtgatgggacgcatcaccatacccatgcccgtaaccgtcactttgtcgcatatttccatatgcccgttgattacgctggctccgccgatcatgcagtaacgaccaattttcaggctgcccgccataatgacgccaccggcaaccgccgtattgtcgccaatcacgacgttatgtgcaatctggcactggttatcaatgatcacgccattgccaataacagtgtcatccagagcgccgcgatcgatggttgtgcaggcaccgatctccacgcgatcgccaataattacgcgaccaatctgtgggatcttcacccagttaccacgatcgttggcataaccaaagccgtctgcgcctaccactgttccggactggatcaggcaattctgaccgatctggatctcatggtaaatggttacgttcgcccagagacgcgaacctgcaccgattttgctgtttttacctacgaagcaaccggcaccgataatcacgttatcgcccagttcaacgccggactcaatcaccgcgttagcgccaattgagacgttgttacccagcttcgccgtcgcgtcaatcactgcactgggtgcaatgttctgcgcgggctgcggcgtggtatctaaaatttgcgccatgcgcgcgtaagtcaggtagggattcttcactaccagcgcggcacttttcgcgaaaggaagatcgtcctgggtcatgacaaccgcggacgcctggcacaagcctaaatgctcacggtattttgggttaaccatgaacgtaatgtgacctgtttgtgcagattgcatggacgcaacgccggtgatgacgatatcgccatcaccgtgtagttctgcatccaactgctgcgctaaatcagccagtcgaattgaaggcattacttatttaacctgtttcagtacgtcggcagtgatgtcttttacatcgctgctgttgtaagcaacggcgtttgcatcaacaaccagatcgatatcctggctgttggcaacggatttcacagcagtctggatacgagtaaccagtttgccgcgttcttcgttggaacgacgtgcgcgatcctgctcaaaagcctgcgctttctgagcaaaagtctggcgctgagccatcacgtctttttccagcttagtgcgatcgctgcccgctttcatggactgcagctttttcattttagcctgcagatcggtttccatacgctgcagttcgctggcacggcctttgaactcattttccagcgtgttagaaacaccggttttctgcgctacctgctggaacaggctgcccatattgacgattgcaattttgtcagccgcctgagcagaagttgccagtgctaaaccaagacctgcagctaataaccactttttcacaataaactccttaccatcccatttgcaccggagggtgcagttctttgcgtggcccggcgatcttatattgatcgcctaaagtcatcgctacactaccactacattcctttgtggagaacacttaccaggttttaccgatgttaaactggaactgttctgccttgtctccatcgtactttttgaacggctgggcgtaggagaacaccaacggccccaatggggacatccattgtaatgcgatacccgcagacatacggatattgcttggatcactatagtccggatatccagaatattggctggaatcccagtttgtatcccaaacggtacccatatcccagaagaaggaagtacgaaccgagttagcatacttgtcgctaatgaacggcgtcggggtgatgaactcgaggctggcaaccgccatggcgttaccgcctacagcatcatccgatttacacaggtctttcgcgccgtcctgagtcgcacattcgtaatcatagtccggatcataattactggcctgatgcgggaagtaaactgctttcggaccaatggtattggactggaagccacggacggtgctggaaccaccggcatagaagttctcatagaacggcatctctttgccgcctaaaccatcaccataaccccagcgggtacgacccagaacaacccatttgtgatcgtcatcaatcggcacataagtcgccgtgtctaacgtcactttgtagtattcgttatccgatcccggaatggtcactttaccggtcaggttgacacgtgaaccatctgtcgggaagtaaccacggtcaagcttgttataggtccaaccatagttgaacgtgaagtcgtccgttttgaagctgttatcctgatcagaggtgctcggatgttcacccatagagtacagatagcgccacatcgcaacctgaggctgcatgttggacagggagttatgtacataacccagacctgcacgcagcgagttatattcgttgatcgggaagcccaacgtcacgtctgtaccataactcttgttggtatagtcggacaggtcggcgtcatctgcctggaagtcattatagaagagacgaccaccgaggcttacgccatctacggtgaagtacgggttggttaccgacagttcagcataggtctggtaatcgtttttggtcccgttgataccaacagcataacctgtccctaaccagttatcctgttgcacaccagcctggaagctcacgccactttcagtaccgtaaccaataccaaagttgaagctaccggtgttgcgttctttcaccttgtagactacatcaacctggtccgggctacccggaacacgttgggtatcggtatcgacagtttcaaagaagcccagacgattcagacgctccttaccctgatcgaccagatcgctccccagccatgcaccttccatctgacgcatttcgcgacgcaggacggcatctttcgaggtatcgttaccttcaaaacggatcttacgcacgtagaaacggttacccgcatcaacgttcacacgtaatttaacggttttgtcggcatcgttaatttcgggcatcgactgtacgcgcggataggcataaccatagcgaccgagaagctttttaatgtcatcttccatcttggtcactttggtgccgttatacagctcacccggctcgatcttagtcagctgctcaatttcagcggagtgcccggcaaggttgccgctcacttcaacgccagaaagcttgtactgatcgccttcggtgatgttcaccgtgacgtaaataccttttttatctggcgtcagactgacctgggtagagtcgatgttgaaacgggcataaccgcggtccagatagtagctgcgcagggtttcaaggtcgcccgccagtttctgtttctggtatttacgatcgcctaccacgttccaccacggcacttcgtcacgcagttggaaatgagagatcagttcgtcggtggtgaaagcatggttaccaacaatattaatttgctggatttcagctgacacaccttcctggaacaccagttttaggtcaacacggttgcgcggcagcggggtcacgacagctttaacgctggcgctatatttaccgacgctgtagtagaagtcttccagacctttctcgatatcggcaatggtggtgcgatcgagggattcgcccacacgcacaccagaagcctcgaggttttgcttcagcatgtcatctttcaccgatttgttaccggagaaagtaatgctggcaatggtcggacgttcttttacctgaaccagaagggtatcaccatcacgaaggacgcgaacatcctcaaagttgccggtagcaaacagagcgcgaatggtattactgatatcttcatcattaaccgtgtcgcctgtgcgcaccggcatactgaggagggccgcaccaacggcgacacgctgaaggccttcgaaatgaatatctttcactacgaacccttcagcaccgtatacggtggcgctgctaaacagcagcgacgctatgagcaactttttcatcgccatcgttattatgcgttcttcctaactaactctcataaccgagagaaatcattgaaaagtgcaagccccattaacagcaccagcagaatcgagccaatgcgataacaaaagtcttgaacccgctcggataccggtccgcccttgatcttttcgatcgcaaggaacagcagatgccccccgtcaagtacgggcaacggaaacaggttaattatccctaagttcacgctaataagcgcaagaaacggcaggtaataaactaccccgagttccgctgtcatcccagcccccttggcgatagagatcggcccactgaggttgttcagtttcacatcaccggtgatcaattttcccagcatactgaccgtcagcttcatcagctgccacgttttgtccgtggcttcgacaatggcgttgaacggcccatactggcgtacaactttatactcatctggcaaaggaatgactttcggctcaataccgacaaaaccaatcgctttaccattacccggtttactctccgggattaatgtcaaagacaagggacttccctgcctttcgatttctaacgctaaggatttacccgggttatcccggacaagcatcacaaaggtcacccactgcgttaagggctgaccatcgactttaacgatcctgtcgcctgcttgcaaacctgccttgcttgccgccgagtttggctgcacattttccagtacaggttcaatttgcggcccacgaggacgaatccccagcgaagataccggatcttctttatcaggctcaaacgcccagtgacgtaaatcgagctttacatcccgccgttggtcgctgccaaatggcgctactgtaatggtggtgctttcatcgccaattttatcgaccaactgcaaacgcacggcatcccaatcaggcgtttcgataccatctacggcttttagttccgtacctggtgcaatttgtgcttccgcagctatcgaattggctgctatttcgccaaccaccggacgtacgccaggcacaccaataataaaaaccagccagtaggcaaagatagcaaaaatgaagtttgcaaccggacctgcggcaataatcgccgctcgttggccgacagatttattattgaaggcatggtggcggagttccggaacgaccggttctgcgcgctcatccagcattttgacataaccgcccaacgggatcagggcgataacatattcggtgccgagcttatcagttcgccgccagagcgccttaccaaaccctattgagaaacgctcaacgcgaacaccacaacgccgggcaacccagaaatgaccaaattcatgcacggtgataagtacacccagtgcaacgatgaacgaagccaaatcccagagaaaactcagcatattaccttccgttaaagcgtcctgaataccagtaacaacaagcaagcaaagaccggtaccgcagccgtcaggctatcaatacgatctaaaataccaccgtgtcctggaattaaatgaccgctgtccttaattcctgcttcacgcttaaacatactctcggtcagatcgccgagcactgaggctaacgctgcgacaatagagcaaatgagtaaggtgacgggagcgacgtcgagattcgcccacatgccataaccccatgagattaccgctgcagtagcgagtccaccgataaagccttgccaggttttacccggagaaaccttcggtgccagcttatgtttaccaaacaatttgccaaacatatatgcgccggagtcagcgccccataccaggatcatgacatagagcagccatattgcgccactgtaatgattctcgtcatagtgccaggcccgtaacgccagcatgccccagaagaagggaacaatggttagcacgccaaaaataaggcgcaatgttttagagttacgccagattgctgcggaacctgggtaaaacagcaccagcaatagcgcgacaatccaccaacccagcgaagcccaaagtgagatttcaaccagcggttgatgaatatttcggtgatattccggcaacagaaaaagcatcagcgccaacaataacccgcataacaccgccaaccatactcgctgcgaacgagtggtaaaaccgctaagctgtccccattcccacgctgccagcatgcagaccaccagcgttacaatggcgaaccccaccggcggcaacagaaacaacgccgcgatgacgacgggtattaacacaaaagcagatatcaggcgatacttcagcaaaagcgacccccatcaggctgtttcatcaccgggctcggtgccgccgaaacgacgctctcgattagcaaaggcatttaacgccccttcaaagtcttgttcatcgaaatcgggccagagaacatctgtaaagtaaagttcggcataggcaatttgccaaagcaaaaagttactaatgcgatgctcccccccagtcctaattactaaatctacaggggccagttcatgcatacagacatgctggtttagcatctcttcatctatctgatctggttgcaggtttccttgctgcaccttttcagccagttgcctgactccctggactatatcccaacgtccaccgtagttcgccgcaatattcagcgtcagaccggtattcccggctgttagcgcttcagatttacgaatacgttcttgcaaacgcgagttaaagcgactggtatcgccaataatacgcagacgcacgttatgtcggtgcagactttttacttcgctatcgagcgcccacacaaacagttccattaacgcactgacttcctgcgctggtcggttccagttttcactactaaaggcatacagcgttaacgcctcaataccgttgttggccgcaaaagagacagcccggcggacggattttgccccggctttatgcccaaaggcacgaatcttcccttgcttttttgcccagcgaccattgccgtccataatgatcgcaacatgacggcagccatgcgctggcaatttttcgctaagtggttgagtagcagacaacatcacgcgttttttattccctgacagggtttacggtactcaggaatactgaagcctatacaaaaaaaagccgtgtaaaaccacggcatacctgaccttataaagccaactacttacgatcagatggcgcagactatatcactgaagccctacgctaacaaatagcgcgactctctgtagccggattatcctcagcttgcgagacgcatcacctcttttctggcgacttcacgcgcgttcgcatcaacagataacacatcgtccacacattgtggttcgcgcatatccattttttccagtacggataaattcaacgcagcgatatccgtaaagcggatttgttgcgcaagaaaagcagcaacggtgatttcgtttgcggcattcaatgctgtcgtcgctgcctggccttgttcgaacgcctccatcgccagtttcaggcatggataacgatcataatccggtgcggcaaatgtcaacgcacttagtttgcaaaaatcgagcggcttcacgccagagttcacgcgattcggccatgccatggtgtgggcaattggcgtacgcatatccggttcccccagctgcgccagaacactgccgtcctgatagcgcaccattgagtgaatcactgactgcgggtgaatcagcacttccatctggctggcgctggcgttaaacagccaacgcgcttcaatgtattccagacctttgttcatcatggtagccgaatcgacagaaattttacgccccatcgaccagttcggatgacggcaggcttgatccggcgtcattgttgccaaatcgcgcaatggcgtctcacggaaagggccaccagacccggtaagtaaaatggacaccacgccattttgctcaaggtcagcgtatcccagattatgctggataggttgcggtaaactctgaaaaatggcgttatgttcgctatcgaccggtaacaattgcgctttgctctgctttacggcgtccataaacagacgtccgcaggtaaccagtgattctttattggccagcaaaatggttttacccgcgcggatcgcagcaagcgtaggtaacagcccagcagcgccaacaatggctgccatcacctgatcaacatcctcaagcgctgccatatcgcaagcggcttgttgcccacttaagacttcggtgcggctaccctgttgctgtagcatcgttttaagaagtttcgcactcgcttcatcgtccattacggcatagcggggagagaattccaggcactgttctaccatgcgagtgacatttttgcctgccaccagcgcaactacgcggaagtgttcgggattatggcgcaccacgtccagcgtgctgcaaccaatcgagccggtcgagcccagaatggtgagttgcttcatgaaacatccagagttgagacagaataaaaagcaaaacgccgccagccgatccgcaaggatctactgagcggcgtttttgtcgttcaagaaatcagaactgcatcagttctgcttctttgtctgccagcgccgcttcaattttcttgattgcagcatcagtcagtttctgtacatcgtcctgagaacggcgatcgtcgtcttcgctgatctctttatctttcaacagtgctttcactttgtcgttcgcgtcacgacgcacgttacgtactgcaacacgcgcttgttctgcttcaccacgaacgattttggtcagatctttacgacgttcttccgtcagcggcggcagcggaacacggatgtcgctacccgcagagttcgggttcaggccaagatcggacgccataatcgctttttcaacggccggagacattgaacgatcaaacacgttgattttcagtgtacgggaatcttctaccgttacgcttgccagctgacgcagcggcgtcggcgtgccgtaatattccacgacaatgccatccagcaggctgggagaagcacgacccgtgcgtattttgctgatttgggttttgaacgcttctacgcatttgtccatgcgtacttcagcatcttttctgatatcgctaatcacgttacgaatccttgaaaacttgtctcagtcagaccagacagtcacacacagtggaagtgtgctaagtatagccctgattaaacatattacgggtaatcgtctggattattaggctattttatttgccattttggccccgggcagtgctcgccatcctcacgtacttttgtacgctccggttgctgcgcgctggccgtgaccaaactgcctgcaacaataacgccttataaccagacttacgcccccgcgatacttacgcggaatcttacccttatttatccatcacgggaattattccgtgattaaagtcccttctttttcacccattaccacacggcgcagcgcacccggtttgttcatattgaaaacacgaatcggtaatttatggtcacgagccagcgtgaaggccgccaggtccatgactttcagctctttttccagcacttcgctgtaagtcagttgctcgtacatggttgcggttggatctttcgccggatcagcggtaaacacgccgtcaactttggttgctttcagcaccacatcggcttcaatttcgataccacgcaggcaagctgctgagtcggtggtaaagaacgggttacctgtaccggcggagaggatcaccacacggttgttgcgcaacaggctgatagcttctgcccagctgtagctgtcgcacacgccattcaatggaatagcggacatcagacgagcgttcacataggcgcggtgcagtgcatcacgcattgccaggccgttcattacggtcgccagcatccccatgtggtcgcccacaacgcggttcatacccgctttcgccagaccagcgccacggaacaggttacccccaccaatcaccacaccaacctgaatacccagttcaaccagttctttgatttcctgagccatacgatccagtatgcttgcatcaataccgaagccttcagtgccctgcagagcttcgccactcaacttaagcagaatgcgtttatagacgggttttgcattggtagccatgtttctttcctgagactgtcaacgattgaaatgaattaatactagcgacattgtacgtcgcttttcagcgcagccccacaagggttagctgaatttacaagatgggcacaaaaagaagccgccctcaggcggctcctttttgataattaagactgcttggacatcgcagcaacttctgctgcaaagtcagtctcaactttctcgatgccttcacccacttcgaagcggatgaagccagtcacttcagcgttatgctctttcagcagctgaccaacagttttgcttggttccataacgaacggctgaccggtcagagaaacttcgccggtgaatttcttcatgcggccttcaaccattttctctgcgatttctttcggcttaccagactgcatcgcgatatccagctgtacctggtattctttttctaccacttcagcggatacgtcttccggtttgatgaattctggcttgcttgcagcaacgtgcatagcgatgtgtttaaccagctcttcgtcagcgcctttagcagcaaccagaacgccgatacgcgcaccgtgctgataagaacccagaacgtcgccttccagcgcagcaacgcggcgaatgttgatgttttcaccaattttcgctaccagcgcaacacgttcttcttcgaactgtgctttcagaacttcaacgtcagtgattttgccagcaacagctgcgtccagaactttgtctgcgaacgcctggaaaccagcgtcttttgcaacgaagtcagtctggcagttaacttccagaatgatgccgtagttgccgtcgattttggttttgatcacgccgtcagcagcaacgttgcctgcttttttcgctgctttaatagcaccggacttacgcatgttttcgattgccagctcgatgtcgccgttagcttcagtcagtgcttttttgcaatccatcatgcctgcgccagtacgctcacgcagctcttttaccagggatgcggtaatttcagccattctaaaatcctcggagatgtgatctgcccggcattaaaccgcacagatataaaagtgaaaaagggggccatatgcaggccccctaaccaaacgtgtactacctggtctataagggctctcccccttcatatttcgcgccgcagatgcgttatcttcgctcgctcatcccggtcacttactgatgtaagctcccgggaattctcgagcttgccgcctttctgcaactcgaactattttgggggagttatcaagccttattactcagcttctacgaagctttcttccgcctgggaagccagatcctgagaacggccttcacgtacggttgcagcaacagcgcccaggtacagggtcacagcacggattgcgtcgtcgttacccgggataacgaagtcaacaccgtccggatcagagttggtatcaacgatagcaaataccggaatacccaggttgtttgcttctttgatagcaatgtgttcgtggtcagcatcgattacaaacagagcgtccggcagaccgcccatgtctttgataccgcccaggctgttttccagtttctccagctcacgagtgcgcatcagcgcttctttcttggtcagcttgtcgaaagtaccgtcctgagactgagtttccaggtctttcagacgtttgatggactgacgaacggttttccagttagtcagcataccgcccagccagcgatggttcacgaagaactggtcgcagctcagagcagcgtctttcaccgcttcgcttgcagcgcgtttagtaccaacgaaaaggattttacctttgcgagaagcaatcttgttcagttcagccagagcttcgttgaacatcggtacagttttctcaaggttgatgatgtgaactttgttacgcgcaccgaagatgaacggcttcattttcgggttccagtaacgggtctggtgaccgaagtgaacaccagccttgagcatgtcgcgcatggaaacagttgccatgattaaaacctctatataaaagttggggttatgcctccacgtatcccatattaccgaccccaaagggcaccccggaatatgtgccgatacgtgtgtgttgttacacaaagtgagattgtcgcttccgtccagtctgtgtatacgaaatggatcggaagtccggcgcgctttataccacaaatacgtcgtggacaccaataattgttggcgctgtgtacagcatcagacgtcgaattttctattatagaaaaccttcagtggcacgtttggcgaaattcagaatgattctcaatttgcccgggtgtgataccattgacggcacttacatatatattgtcggtatcaccgacgctgatggacagaattaatggctatctcaatcaagaccccagaagatatcgaaaaaatgcgcgtcgctggccgactggctgccgaagtgctggagatgatcgaaccgtatgttaaaccgggcgtcagcaccggcgagctggatcgcatctgtaatgattacattgttaatgaacaacacgcggtttctgcctgcctcggctatcacggctatccgaaatccgtttgcatctctattaatgaagtggtgtgccacggtatcccggacgatgctaagctgctgaaagatggcgatatcgttaacattgatgtcaccgtaatcaaagatggtttccacggcgatacctcgaaaatgtttatcgtcggtaagccgaccatcatgggcgaacgtctgtgccgcatcacgcaagaaagcctgtacctggcgctacgcatggtaaaaccaggcattaatctgcgcgaaatcggtgcggcgattcagaaatttgtcgaagcagaaggcttctccgtcgttcgtgaatattgcggacacggtattggtcgcggcttccatgaagaaccgcaggtgctgcactatgactcccgtgaaaccaacgtcgtactgaaacctgggatgacgttcaccatcgagccaatggtcaacgcgggtaaaaaagagatccgcaccatgaaagatggctggacggtaaaaaccaaagatcgcagcttgtctgcacaatatgagcatactattgtggtgactgataacggctgcgaaattctgacgctacgcaaggatgacaccatcccggcgataatctcgcacgacgaataagatgaagccggcgaatgccggcttttttaatgcgataatttaatcttatgggtggcgcacaatgaatacccttccagaacagtacgcaaacaccgctctccccaccctgcccggtcaaccgcaaaatccatgcgtctggccccgtgatgaattaaccgtcggtgggataaaagcccatatcgatactttccagcgttggctgggtgatgcctttgacaatgggatctctgcagaacagttgattgaggcgcgcaccgagtttatcgaccagctcctgcaacgattatggattgaagcgggattcagccagattgccgacctggcattggtcgccgtcggtggctacggtcgtggcgagctgcatccactttcagacgtcgatttactgattttaagccgtaaaaagctcccggacgatcaggcgcaaaaagtgggcgagctgttaacgctgctctgggatgtaaagctggaagtcggtcatagcgtgcgcacgcttgaagagtgcatgctggaagggttatcggatttaaccgtcgccaccaatttaatcgaatcccgcttattaattggcgatgttgcgctgttcctcgaactgcaaaaacatattttcagcgaaggattctggccttccgacaagttctacgcggcgaaagttgaagaacagaaccagcgccatcagcgttaccatggcaccagctacaaccttgaaccagacatcaaaagcagccctggcggcttgcgcgatatccacactctgcaatgggtggcccgccgtcattttggcgcaacatcgctggatgaaatggtcgggtttggcttcttaacctcagcggagcgggcggaattaaacgaatgtctgcatatattgtggcgtattcgctttgccctgcatctggtcgtcagccgttacgataatcgcctgttattcgatcgccagcttagcgtcgcccagcgtctgaattacagtggtgaaggtaacgaaccggtcgagcggatgatgaaggattacttccgcgttacacgccgcgtcagtgaactcaaccagatgctgctgcaactgttcgatgaagccatcctcgcccttcccgccgacgaaaaaccacgtccaatcgacgatgagtttcagctacgcggtacgctaatcgacctgcgtgatgaaacactatttatgcgccagccggaagccatcttgcgtatgttctacaccatggtgcacaacagtgcgatcaccggcatttactccaccacgctgcgccagttacgccatgcccgtcgccatctgcaacaaccgctgtgtaatattccggaagcacgaaaactgtttttgagcattctgcgtcaccccggagcggtgcggcgcgggctattgccaatgcatcgccatagcgtgctcggcgcgtatatgccgcaatggtcgcatatcgtcgggcagatgcagtttgatctgttccacgcctacacggtggatgaacatactatccgcgtgatgctgaaactggagagttttgccagtgaagaaacgcgccagcgccatccgttgtgtgtggacgtctggccgcgcctgccgtcaactgagctgattttcatcgccgcgctgtttcacgatatcgccaaaggacgcggcggcgaccactccattctcggtgctcaggatgtagtgcattttgccgaactccacgggctgaactcacgcgaaacacagctggtcgcctggctggttcgccagcacctgttgatgtcggtgaccgcccaacgccgcgatattcaggacccggaagtcatcaagcagtttgccgaagaagtgcaaacggaaaatcgtctgcgctatctggtatgcctgactgtggctgacatttgcgccaccaacgaaacgctgtggaatagctggaagcaaagtctgttgcgtgagctctactttgccaccgaaaagcagctacgacgcggaatgcaaaacacgccggatatgcgcgaacgggttcgccatcaccaactccaggcactggcactactgcgcatggataacatcgacgaagaggcgctgcaccaaatttggtcacgctgtcgtgctaactattttgtccgccatagcccaaatcaactggcctggcatgcccgccatttattacagcatgatttaagcaaaccgctggtattgcttagcccgcaggctacgcgtggaggcaccgagatttttatctggagcccggaccgcccttatctgtttgccgccgtctgtgccgaattagaccgccgcaatttaagtgttcacgacgcacaaattttcaccactcgcgacggtatggcgatggatacctttatcgtgctggaacccgatggcaacccgctgtccgcagatcgtcatgaggttattcggtttggtctggagcaagtactgacgcaaagtagctggcagccaccgcagccccgtcgccaacccgccaaattacgccattttactgttgaaaccgaagtaacgtttttgccgacccataccgaccgcaaatcgttcctcgaactgatcgccctcgaccaacctggactgctggcgcgagtcgggaaaatttttgccgatctgggaatttcgcttcatggtgcccgaattacaaccattggcgagcgagtagaagatttattcataattgccaccgctgaccggcgtgcgcttaataacgagttgcagcaggaagtgcatcagcggttgacagaggccctcaatccaaacgataaagggtgatgtgtttactgatatgaaaagagtttaacaatgcagcagttacagaacattattgaaaccgcttttgaacgccgtgccgagatcacgccagccaatgcagacaccgttacccgcgaagcggtaaatcaggtgatcgccctgctggattccggcgcactgcgtgtagcggaaaaaattgacggtcagtgggtgacgcatcagtggttgaaaaaagcggtgctgctctctttccgtattaatgataatcaggtgatcgaaggggcagaaagccgctacttcgacaaagtgccgatgaaattcgccgactacgacgaagcacgtttccagaaagaaggcttccgcgttgtgccaccagcggcggtacgtcagggtgcgtttattgcccgtaacaccgtgctgatgccgtcttacgtcaacatcggcgcatatgttgatgaaggcaccatggttgatacctgggcgaccgtcggttcttgtgcgcagattggtaaaaacgtccacctttccggtggcgtgggcatcggcggcgtgctggaaccgctgcaggctaacccaaccatcattgaagataattgcttcatcggcgcgcgctctgaagtggttgaaggggtgattgtcgaagaaggttccgtcatttccatgggcgtatacattggtcagagcacccgtatttacgaccgtgaaaccggcgaaatccactacggtcgcgttccggcggggtctgtggttgtttcaggtaatctgccgtcaaaagatggcaaatacagcctctactgtgcggttatcgttaagaaagttgacgcgaaaactcgcggcaaagtcggcattaacgaactgctgcgtaccatcgactaaaagtatgcacacgggcagcacgacgctgcccgatttttttgcagggatgagcgatgatttcacgccgccgatttttgcaggctactgccgcgacgatagccacgagctcaggtttcggttatatgcattactgtgagccaggctagtttgaattaatccgtcaccgcctcgccttttttaaagacaacgcagcaccattcaaaattctttttctggccgatctccattactctcgttttgttcctttaagcctgatttctgacgcgattgctcttggcatagaacaaaagcccgatttgatattactgggcggcgattacgtattatttgatatgtcgctgaatttttcggcgtttagtgacgtactctccccccttgccgaatgtgcgccgacgtttgcctgcttcggcaaccacgatcgccctgttggtacagaaaaaaatcacttaattggcgagacgttgaaatcagcgggcatcacggtgttgtttaaccaggctacggtgatcgccacgccgaacaggcaattcgaactggtaggcactggtgacttatgggccggacaatgcaaaccgcctcccgccagcgaagccaatctgccaagactggtgctggcgcataatcccgacagcaaagaagtcatgcgtgatgaaccctgggatctgatgctgtgcggccatactcacggcgggcaactgcgcgtaccgttggttggtgaaccttttgcccctgtcgaagataaacgttacgtcgccggattaaatgcctttggcgaaagacacatctacacaacccgtggcgtgggcagtttgtatggtttgcgtctgaactgccgcccggaagtaacgatgctggaactggtgtagatcgtgaattttatcaccagaataaagcaggtaattttttgatttttacgccatgatagaagtctggaagaaaaaggctttctgcgatcacagtcgagccgggcgggccaggccaaatgctaaaataagcacaatttactgactcattttgaggtaacgctatgtacgacaatctgaaaagtctgggtattaccaatcctgaagaaattgatcgttacagcctccggcaggaagccaacaacgatattctgaaaatctatttccagaaagacaaaggcgagtttttcgccaagagcgttaagtttaaatatccgcgtcagcgtaaaacggtcgtcgctgatggtgtgggtcagggttataaagaagtccaggaaatcagcccgaatctacggtatatcattgatgagcttgatcaaatctgccagcgtgaccgcagcgaagttgatcttaagcgtaagatcctcgacgacttacgtcacctggagtcagtcgtaaccaataagatcagcgagattgaagccgatctggaaaaactaacgcgtaaataatcccgaactgacggttaattcgggcattcccctctacccttcgggctgaggggaatgagccagcgccgcctcaaccttaacgcataacctaccgctcttcatccagttgtaacgccacatacagcagcaacctgtcatcaaaattgcccaaatcaagcccggtcagttccgatatacgattaagccgatactccagggtattacgatgaataaacaacgcctttgacgttgccagcggttgcacattgtggcgaaaccacgccgccagcgttcgtcgcagcaagccgttattgtccatcgttttcagccgcgccagcggtcgcgccagttcgttggcctgccagtcgccacgcaaactgtcgagtaacacaggtaacatcagatcctgataaaaatagcagcgactttctggcatccgctgtttacccaccaccatcgtcgttttcgccgtacgataggatcgggcaatactgccaggaccggtaaaatagttgcccagtgaaacgcgaaaacgcagctggccgtactctttcatgcgggtaatcagttgttcaactcgcttacgatgatcttctgcatcccagcgcccaaaagagttcaacgccggtttcaacaccaccatttcggttagcgagacaatcgccaccagattattacgctcgggcgtagtcagcgcgttttgcagttgttgtaactccgccattgcgctgtccacgccaagctgaccgctgtcgacctcaacaatagccaccactcgcggttgattgagatcgatccccagccgttgcgcccattcagtaagtgcgggagtattctcctctgcctgaatcaggttcatcaccagttcttcccgcaaacggctatcctgcgccaacaagtgcatcaaccgcgactgttccagcatcatttcagccgtcatgcagaccagttcgccatatttacgcagattctctggttcacctgtcaggccaattacgccgacaatttcaccttccagccgtaacggtagattaatcccctgccgcacaccgtgcagatgacgtgctaccgcgtcatcgatatcgacgactcgtccctgtgaaagtaccagcaatgcaccttcgtgcaattcaccaatacgctcacgatcgccgctgccgataattcgcccacgggcatccattacgttgatattggtatcgatgatgcgcatggtacgtgccacgatatcctgcgccattttggtatcaagatgccagccagccataagtcctccgttatgcacggcttagcataaggaagtacgtaacgtacggcattgtgcaaatgcctaaaggatgatgaagatgtatggagttgtggtgaagttcacagattgtaaggagaaccccttcccgttttcaggaaggggttgagggagattactgcattaacaggtagatggtgctgtcgccgcgctgaatgttgagtgccagcacagacggtttgctgtcgagaactttacgcagttcagcgatgtttttcactgcctgctggttcgcgccaataatcacatcacctttcttcaggccgatctgcgcagccggagtgcccgttttcacgttgttcactaccacgccctgatctttgcctttgttgctcatctcagcgccttcaatgccgttgaagatggagctggaatcaacctgattctggctgctctgctgcagttccaggttcacgttaacctgcttaccgtcgcgcagtaagcccagggtcagtttgctgcctaccggcatagtacccacctgagcacgcagtgcggcaaagctgctgatcggcttaccgttcagtgaggtgatcacatcacccgctttaatgcccgcttttgcagcggaggaattaggcagaacctggcttacgaaagcaccgcgctgggcgtcaactttcatcgctttcgccagttcggagttcagctcagtccccataatacccagctcaccgcgtttcacctggccgtattccaccatctgcgaggtcaggtttttcaccatgttactcgggatagcaaaaccgataccgatgttgccgccgtccggtgcgaggatcgcggtgttgataccgatcagttcgccgttcaggttaaccagcgcaccaccggagttaccacggttgatcgctgcatcggtctggatgaagttttcgtagttttcggcattcaggccgctacgccccagcgcagagacaatcccggaagttaccgtctcgcccagaccaaacgggttaccaatcgctacggtgtaatcacccacgcgcagtgcatcagaatccgccatcttaattgcggtcaggtttttcgggttctggatttggatcagcgcgatatcagagcgcggatctttgccaaccatcttcgcgtcgaacttacggccatcgctcagttgaactttaatgaccgtcgcgttatcaacaacgtggttgttggtgacgacatagcctttatcggcatcaatgatgacgccggaacccagcgccatgaatttctgttgctggccgccaccattaccgccctggccaccctggcagaacggagagctctggaacggagaaccttcctggcagaacggagaatcatcaccgaagaactgctggaaattacgcggcatacgcggcgtattaacggttgtgctaccttctacgttaatgctgaccactgaaggcatcaccttttcgagcatcggtgcaaggcttggcatctgctgggctgtcgttgctgaagaagtctcagccgccgttgcagagagcggagataacgccaaacctaaactcagagccagtgcactcagtgctaatgtggtttttttcatgtatttcagtctcgattaacagataacgcaaaattgctgtgttcttcagattcgttttatagcctgaagttccgaactaaagtttctgcaaaaggtaaaaatttattgttcgtctttacaaaagcctggttattgttctacggccatcagacgtcggtattcatcccacgcatagaggtcggtcataccgctgatataatcctgcagcaggcggcaacggtaataatattcccatagcggaaactcaggagaatctgacggtaatttactgacagcctcgacataggccagccgatggcgcgtcgagagtttgtggaataagcgcgattcaatagggaaacgtttcacccgttctttttctaccagttcagtaaagtctgataacgacaggcttaataaaggacgataaatctctaataatccgctaatgacccgatagccctgcaattcaagctgctcgacatctggatggctaaacacatgttttacagcgacatttttatatagcttaagaagatcgctgcattcgctggcatcttccaataatgcatgattaaacgttccggcgaaaatcgcaggcagattatcaataaatcgttgtgccgcgtagggtaccagtttatttagggtgtttacccgtaaatacataaaaaactgatcttccgtactgcggcttaaactatttgagcgtgatttttcccaggcattttcaaccaccagcgaaaagagcgaacctttctcatgctggccccacgcttcgtgcaaatgatgataaagctgctcaacggtaaatattcttttctctaccgcatcttcaaggtctgccacacaataggagatgtcgtcggcagcttccataatccacgttaatggaaaacgactgtaaagcgccaaattaagttctttacgcaaccgggcaatataggcttcttcagaaagataataacccggctttttcattaaatagtgatgtgtctcaggcgtttcgccacgccaccacgccggacgggtatattttaaaataccgccaacctgtgcccaggtgagattcatccgcatcaatgtatgcaccaggcgaatgccttgtgcattcccctcaaaatgacataagtcctgacgaatcttgcgccgcagctcgttaagcggttcttccccgtcccgtaaacgtagtgccgccacgctgcagcgatcgtcagtcagaggctggctttcggcatcttccgggtgcaaacgttggcgaaaccagtcatttatcgccgcttcgccaaaatgaccaaacggcggattgccgatatcgtgcatcaggcatgacatctcaacaatgctttcaaagggaccggtcagttcatccaggccgtatgcttccagtaatttaagctctttcagacggcttaaaatttctttggcgatgtagcgccccacctgctggacttccatcgagtgggtaagacgcgtgcgcacggcggcattgcgctccagtggaaaaacctgggtcttttgttgcagacgacgaattgccggagagttgatgatacgcccgcgatcgctctcgaagatccgcaggatctcatgttcggttttaacgccctgcggtgaacggtaacgacgatgccagtttattttttttcggaaatcaatctgtgccatgtcctctcccgcgtgagaaatacgcttccccgtaagcgcatggtaaactatgccttcaaatcgggcttatcgcgagtaaatctatgaaaatcggcatcattggtgcaatggaagaagaagttacgctgctgcgtgacaaaatcgaaaaccgtcaaactatcagtctcggcggttgcgaaatctataccggccaactgaatggaaccgaggttgcgcttctgaaatcgggcatcggtaaagtcgctgcggcgctgggtgccactttgctgttggaacactgcaagccagatgtgattattaacaccggttctgccggtggcctggcaccaacgttgaaagtgggcgatatcgttgtctcggacgaagcacgttatcacgacgcggatgtcacggcatttggttatgaatacggtcagttaccaggctgtccggcaggctttaaagctgacgataaactgatcgctgccgctgaggcctgcattgccgaactgaatcttaacgctgtacgtggcctgattgttagcggcgacgctttcatcaacggttctgttggtctggcgaaaatccgccacaacttcccacaggccattgctgtagagatggaagcgacggcaatcgcccatgtctgccacaatttcaacgtcccgtttgttgtcgtacgcgccatctccgacgtggccgatcaacagtctcatcttagcttcgatgagttcctggctgttgccgctaaacagtccagcctgatggttgagtcactggtgcagaaacttgcacatggctaagtcactgttcagggcgctggtcgccctgtcttttcttgcgccactgtggctcaacgccgcgccgcgcgtcatcacgctttctcccgccaacactgaacttgcctttgccgccgggatcacgccggttggggtcagcagctattccgactatcctccacaagcgcaaaagattgagcaggtttccacctggcaggggatgaatctggaacgcattgtcgcgctgaaacccgatctggtgattgcctggcgtggaggtaatgccgagcggcaggttgaccagctggcttcgctgggaataaaagtgatgtgggtcgatgcgacaagcattgaacaaattgccaatgcgttacgtcaactggccccctggagtccgcaaccagacaaggccgaacaagccgcgcaatccctgctggatcagtacgcgcaattgaaagcgcaatatgctgataaacctaaaaaacgtgtttttctgcaattcggcattaatccgccatttaccagtggaaaagagtcgattcagaaccaggtactcgaagtttgtggcggagaaaacatctttaaagacagccgggttccctggccgcaagttagccgcgaacaggtgttagcacgctcgccacaggcgattgtcattacaggcggaccggaccaaattcctaaaatcaaacaatactggggtgaacagctcaaaattcccgttattcctctcacgagtgactggtttgaacgtgcaagcccacgtattatcctcgctgcacaacagctctgtaatgcgctttcacaggtagattagcgcctgaccttttcaggtgctcagtggggattgaacaatgctcgtctattggctggatatagtcggcacagcggtatttgccatctccggcgttttgttagccggaaaattgcgtatggacccttttggtgttctggtactgggcgtggtaaccgcagtaggcggcgggacaattcgcgacatggcgctggatcacggcccggtattttgggtgaaagatcccaccgatctggtcgttgcaatggtcaccagcatgctgaccatcgtgctggtgcgccagccaagacgcttaccaaaatggatgttgccggtgctggacgccgttggtctggcggtgtttgtcggcattggcgtgaataaagcctttaatgcggaagccggtccgttaatcgcggtttgtatgggcgtcattactggcgttggcggcgggatcattcgtgatgttctggcccgagaaatccccatgattttacgtacagaaatctacgcaactgcctgtattatcggcggtattgtccacgctacggcttattacacattttccgtaccactggaaacagccagtatgatgggcatggtcgtgacgctattgattcggctggcggctattcgttggcatcttaagctaccgacgtttgcgctggatgagaatgggcgttgaagagagaagatgtgccggatagtttatccggcacatgaacaacagattagatactaaaggaagaaccgcaaccgcaggtgcttttcgcgttcgggttggtcacgatgaaacgagaaccttccagaccttcggtataatcaacggaaccgccgaccagatattgcaggctcatcggatcaaccaccaggccaacgccctgtttttcgatggtcatatcgccttcgttcacctgatcatcaaaggtgaaaccatactggaagccgctgcaaccgccaccggtgatatacacgcgtaatttcagattcgggttatcttcgtcagcgatcaggcttttaactttgttggctgctgcgtcggtaaactccagcggcagtgctacgtcatcactcatattttgctccaaacgacatcggcaattgggcaaattctaacccaataataatcgccattatctaataccctggtatttcgttcaagtattctcgctggctgatgcggccttgcttcgcgccagttgctcagcttcctgttttgccagcgtgcgcgcaagaatcgccgagtatagcggtttcccgccggtaaattgcgctaatagtgttgcgccaagaccggtaataatcattggcaaaatgagctggtagttatcggtcatctccagaaccagaatgatccccgttaacggcgcgcgaatagatgccgccagtaatgcccccattccggcaatagcaaacgtccccgcctcaaggtgatattgcggaaacagctcaacggcaaccattccgaaagcggttcccagcacagtacccagcgccagcatcggggcaaaaataccgcccggcgcgccggaagagaagcagagtaaggtggtaatgacccgcgcgacgaagataaacaccagcattcccatgctgaaattccccgcggtagcgataggaatcaggttaaaaccgccgcccgacgttgctggtgccacaaaccccagcaatccacacagaccgccaatcgcaccgcccattagcacccatttggtaatattgccgccgtgcacacggtgcagcaaatcctgcatccccagcacccatttattaaaaatagggccgaaaatgccaaaaataataccgaggatcagataaagccacagcgtattaagcggcgcatcagaaagtttaccgacgtcaatcaacgcaacttcatgattaaaaatccggtacataatggtcgacataatgacaccaataaataccgctttaatcgaaattaacgtatagcgaaactgcggacgcatctcttcgataataaacaaaatacccgccagcggcgcgttaaaggccgcagccagccccgcagcagcaccggttgccagcagcgtatggcgagcttcgtcacctttcaggcggaaaatatcaagcaccatacggccaatgttaccgccgatctgcacggttggcccttcgcgccccaacaccatgcctccgccgagtgtccccagcccgccaaagaacttcaccggcaatacacgccaccagcgaacgggacgttgatcttccagcgccccttcaatttccgggatccccgaaccacctgcttccggcgcgtatttgcgcaccaaaaagtagccaaacatcgccagcaccgccgaacagagaaaagcgacggttaacagaagcggataattatcagcagtatgtaccagcgcccccatacgttggttctgcaaccaggcgacacctttgtcaaaagcaaccgctgccagcccaacaagcgtgccgacgactgccgccataaacaaaatggctaacggggttttatcgcgctcaagaagttggcgaatcagttgtctgcgtcgcaggcgcgcggcctgcggtgtttctaaagagggagtatcagttttcatccaatgatcacttattggtcatacaaataagatgacggcattttactcgcacgttccatgaaaatcctttgcaaagcgtaatgtttcaaatgcacaaaacttttatactctaagaaatcaggattgcaccagtacaagcagcctgatgtttgacgagtatttaacttgttatgaataacatagaatagcagccattcactttttctacgaatcaggaaccctccatgagtaagtctgaaaatctttacagcgcagcgcgcgagctgatccctggcggtgtgaactcccctgttcgcgcctttactggcgtgggcggcactccactgtttatcgaaaaagcggacggcgcttatctgtacgatgttgatggcaaagcctatatcgattatgtcggttcctgggggccgatggtgctgggccataaccatccggcaatccgcaatgccgtgattgaagccgccgagcgtggtttaagctttggtgcaccaaccgaaatggaagtgaaaatggcgcaactggtgaccgaactggtcccgaccatggatatggtgcgcatggtgaactccggcactgaagcgaccatgagcgccatccgcctggcccgtggttttaccggtcgcgacaaaattattaaatttgaagggtgttaccatggtcacgctgactgcctgctggtgaaagccggttctggcgcactcacgttaggccagccaaactcgccgggcgttccggcagatttcgccaaacataccttaacctgtacttataatgatctggcttctgtacgcgccgcatttgagcaatacccgcaagagattgcctgtattatcgtcgagccggtggcaggcaatatgaactgtgttccgccgctgccagagttcctgccaggtctgcgcgcgctgtgcgacgaatttggcgcgttgctgatcatcgatgaagtgatgaccggtttccgcgtagcgctagctggcgcacaggattattacggcgtagtgccagatttaacctgcctcggcaaaatcatcggcggtggaatgccggtaggcgcattcggtggtcgtcgtgatgtaatggatgcgctggccccgacgggtccggtctatcaggcgggtacgctttccggtaacccgattgcgatggcagcgggtttcgcctgtctgaatgaagtcgcgcagccgggcgttcacgaaacgctggatgagctgacaacacgtctggcagaaggtctgctggaagcggcagaagaagccggaattccgctggtcgttaaccacgttggcggcatgttcggtattttctttaccgacgccgagtccgtgacgtgctatcaggatgtgatggcctgtgacgtggaacgctttaagcgtttcttccatatgatgctggacgaaggtgtttacctggcaccgtcagcgtttgaagcgggctttatgtccgtggcgcacagcatggaagatatcaataacaccatcgatgctgcacgtcgggtgtttgcgaagttgtgatccagcatggtttgtcggatgcggcgtgaacgccttatccgacctacgattcggggccgtttgtaggcccgataagacgcgccagcgtcgcatcgggcatccgttgtcgcgtaaacgctttatccgtccaggcgtacagggccgttatatggaaaaattaacggctctgctttctcaacaaatagataaaatatggcgcgccgataaaggttgacagcagccccgccgggatctggaatggaaacagcaccatccgcccacaccagtcagcgaacaccagcagtaaaccacccaccagcgccgaaattacgatgtgtggcatcgtccgtcgaaagcccatcatccgcgcaatatgcggtgccattaaaccaacaaaactcaacggtccaatagtcatcgtcgcggtcgccgtcaggcaagccgctaacagcagcagcgcaattcgcgtcggcgtcagcgccattcctacggctcgggcggtatcaccacccagcggtaaaatggtcagccagcggcggcacagcggggtaatcgccagcaaaatcaccatcacaattccggtgcgccagacctgcgcatcggtcgcgttgtaggtcgaaccggaaatccaggtcagcacttgcgccattcgcgggtcaccacttgcctgcaacatcatcaaaagcatggtgaacgcggtgcttaacgccatccccgccagtaacatacggtgtggggaaaatccaccgcggccggcggcgatcataatgatcaacagcgtcaccgccgcgccgagactgcctgcaggtaacagccagccaaaggcattacccggcaccagaaacagcatcaacaccacgccaaacgccgcgccggagctaatccccagcacttccgggcttgccatcgggtttccggtcagtcgctgaataatacagcccgccaccgccagcatgacgcccgcaaacagcgccgccataattcgcggccagcgccagggcattaaatcctcgagcaacgccccgctcgcccacgtccagccgtgcgcatcacgaccaaacgacagcgccaccaccacagccatcaacagcagcacgccgcccgcgagggcaaacgccagcacatgttggcgttcagccgcgacacgatcgttgaccttcatatccggcgcgctaatgctgcgtaaacgcggcaacagccacagtagcagcggcgcaccgatcaacgcagtgaccgaaccggtggacacttccatccacacgcgagtcagccagaggatgatttgatcggaaagccagaggatcagcgcaccaatcaacgacgccagcatcagtcgtggcagcagacgccgcgcccccagcatttttgccagcagcggcgcgaacaacccgataaagccgataatccccacagcgttcaccagcagcgcactgatgacaatcgccagcgacagcgccgccagacgcgcaagcgacaaggccagcccgagattgcgcgccacgccatcatcaagccccatcagggttaacggacgaagtagcagcaacgtcagcatcacaccgcccagcagctgcggccataaacgctcaacgccgccccagtcggtttgcgtcagcgttccagtgctccacagaaacatgctttgcagttggtcatgatggaagataaccagtaactgattgattgcgccgcaataaaggctcactaccaaccccgcgagaatcagcgttaccggcgacagccgtttcccccacgcgacgccaaagacaattaagccaacaacacaagcccctgccagcgcagcaaactggctcgccatcgcaccagggatcgcccagagcgtagtgacggtaatccccagttgcgcgcctgtagcaacgccaagcgtcgtcggctccgccagcgggttacgcagcacttgctgaaacagcacgcccaccagccccagacccgcgcccaccagcagcgaaatcgccagacgcggcaacaagctgtagtgaaaaatcatctgctcgatgacgtcaatatccggcgaccaggcagcctgcgcccactggctacgcggcagcgcctgcgagaagttcatccaggtgagcgccgtagcgacaatcactaacagcgccagcaataacgccgggaaaagcgcaattcgtttactcacgctttacctccgatggcgttatccagaacgcgcacaaagtgcattgccgagagcgtcgcaccataaaaccagactgcaggtacgcgctgaaagcgtccggcgcggacaaacggcatggcctgccacagcggcgttgccattagcgcatccatgtctttgctgttgtcgtgatcaaaacagagcacatcaacgtctttatacgccgccagacgatcgatactgacggcggtactgccccagaagttggtttccccttgccaggcatttgggatgccgtactcatcaagaatttcctggaacaagctgtttggaccgaagaccagcatatggcgcggatcgataagcgtcgtcagcaataacggacgcgcaccacgcttcacaaagcggggtttcatgctgcggataaagtcttcatattgcgctaaatgcgtttccgctgcgctttgcaggttaagtaaatctgccatttccgtcagcgatttacgcgccatcgccaacggctgtttgccgtcactgaagttaaatccgcgacccggcgcaatacgagccagcatttctggtgaagggccatatcctgccgaccagaccataaacgatggtttcatttcggtcagcagttcaaggttaggttctgtgcgcaaaccgacgtcgatcactgagtccggcaatggtggttcgctgacccacaggcgatagttgatggtatccgccacgccgtaaggcacgatgccgagcgccagcagtaattccaccggcaaccactccagcgccacaatacgattgggatcaatagccgccgcgtgggcggtattcatctgccataacaacggagaaagcgccatcgccgttaacagtcgacggcgcgaaataagaggtaagccgctcatcaataaacaaaactcacaggtgcagcacccgccggatgcggcaaaatacccatcgggatgccataaatcatttcgagggtttcgccgcgcataatttccgcaggcgttccctgagcaatcatttcaccgccgcgcagggcgaccagataatcacagtagcgtgccgccatattgatatcgtgcaacacggcaatgaccgtcaggccacgctcctgacttaaacggtgcaccagcgacagcacatcaacctggtgggcgatatccagcgccgaggtcggttcgtcgagcaacagacaacggctatcctgcgccaccagcatggcgatccacgcccgctgacgttcgccgccagagagactatcgaccagccgatgcgccagcggttttaagccaaccagcgagatagcttcctcgactttttcgcgatctgccgccccaaagcgccccagcgcgccatgccacgggtaacgaccaatcgccaccagttcacgcacggtcatcccttctgccggaggaagctgctgcggcaaataagccactttgcgggcaaacgctttgctgctccagctttccagcggttgggcatcaagaagaatctccccttccgacggcggctgatgacggccaagcattttgagcagagtggatttaccagaaccgttgtgaccaatcagaccggtcactttcccggcaggaaaggttaacgacagcggatgcaaaagcgtgcgcccgggcacacgaaaggagatattacgcagtgcaaaagtggtatcggaatgattcgtgtattcctgcataacagccaacttgtgaaatgggcacggaaatccgtgccccaaaagagaaattagaaacggaaggttgcggttgcaacgacctgacgttctgcgccccagaagcagccataagtgttaaagcagctggcgacgtattcacgatcgaacaggttgttaacatgcagcgccacgttggagccagccatgccgactcgcgccagatcataacgtactaacgcatccacgaccgtataacttcccactttaaaggagttagccggatcaccataactggagccagtataacgaccaccggtgcccagcgtcagacctgaaagcggaccgtcaaagaaggtgtagtcagcccacaacgaagccatgtgttttggcacctgtgcaggcgtattgcctttataggtagtatcggtggtgtattccgcatcggtgtaagtataagaaccgactacgttaacactcgccgacagcgccgctttcgcttcgatttctacgccacgtgcgcggatctcgccaccttcaaccgagaagaaggaaccctcagggtccgccatcaggttgttggttttagtgagattatacacggcaccagtaactacaatcggacgatcttccggtacatatttcacgccgacttcatactgcttacctttagacggtgcgaaaatattaccatccttcccaacttgcgaagaaggttcaaacgattcgctatagctgaagtaaggtgttacaccattatcaaacaggtagttaacaccaccacgccaggtaaactgtttgtcatcacgtttatcggtcgtcccggcaacgcggttaagagattcttgatctgcccagtcataacgaccgcctagggtgaccagcactttatcccactgcgcctgatcctgaacataaacgcccgtttgtttctgtttattcagaatgcggtaagggccggagtttgccggatctttggcattgaagtcgaaatcggtattcaccggattgtacagattgagcagtggcacagagtcgtcgtaaccaaaccaggcgttgatgtcattacgcatacgcataaagtcgacaccggtcagcagggtgtggtcgatatcgccagtggcaaacttgctctgcaactgggtatcaacggagaagttttgcagcttctcatcatcaacgacgtatttacgtgccagataatggcctttatccgctggcgctaatgccgcacactgtttgctgtaagcattcgccggatcggagcagacgccgtaaccataaacgctgttttgcgaggttttgttttcagcaaagcgcaggttctgacgcacagtaaaggtgtcgttaaattcgtgatcgaagctgtagccgaccatcttctcattacgagaataggtgttgttcttcgccccttcattaaagtctgtcggcagacgcttaccgttcggcagcggctcaacggttccctctttcggcaaccagccgtaataaccggtttccggctcgttctggaagtaagaaaggaaggtaaaattggttttatcatccggacgccaggtgaacgccggtgcaatagcataacgctgctcttctgaccctttctgctgggcattggcagaacgcgcaagaccggtcaggcgataagagtaaacaccgtcatcatccaacgaatcgctaaagtcaaaaccagtctggaacaggctgtcagtaccggctttaaactgaacttctttcagcggttcggtggtcggacgcttgctgaccatattcaacaggccgccaggactgcttttaccgtaaagcacggaaaccgggccacgcataatttcagcgcgttccagcatatacgggtcaatgaccgcatcgttatagaagttgccctgcaacttcaggccattcagatagttattctggctttggccttctgccgcaaagccgcgaatgatcaggtggtcataggtgttggatgcgccacgcgtaccaacagagacacccggcgtgtagctaagcgcttcttttaccgacttcggctgatgcagcgccatctcttcggcggtcacaacagaaatagactgtggcactttttgaatcggcgtatcggttttagtgccggtagcagactgtcgcgccgcaatagttgcagcaggcccccatgcgctttcttgcggcgcaggtgcagcggtaacggtgatagtgtcttctttcggttcaaccgctgcctgtgcataaacagacatgccgctaaccgctgtggctactacaactgcgattttacgcagtgagtgttttggctgagcagttttggaacgcgccattggtatatctctgatgtaaagtgaatgataacgtaaacgagaatgattattataaagataagataatattcgaaacgctggcgggttcgcaagcggtacgcaatctgagcgttcctgaagggttaataaacaaccagatgaaaagaaagggttaatatcttagatgggatgttattttaccggatggcaactcgccatccggtatttcacgcttagatgttaattactaccaaacatatccttgatccaaccggctacaccgtcgctgtctttctgctcttgctgagcaggttgctgttgcggctgttgctgcggctgagaagactgatcaaacggattgcctgacggctgctgctgcatctcgctctgctggcacagcgattgcggatcgctggtccagaccggcaagatacgcatgccaccgctgcaaacaaagttgccgtcgtagtccacgcccatatctgcaatatcttctggcggaacaagattcagcggcgttggcgtctggttagccagataacgctgataaatcgacattgccccgctggcaccatacagtttggtcggctggttgttatcacggccgacccaggtgatggtcaccgtgctgccgtcaatgcccgcaaaccaggtatctacgttattgttggtagtccctgttttccctgccagatgcaggttcgggtatttcgccccaagctgacgacccgtaccgcgttgtaccacctgctgcatggtccatagtgtcagatacgccgcctgcgccggaacagcgcgttccgcctgcgggaagctctgatacagcactttgccatcttccgcgattaccgaacgcagcgcagaaagcggtgcacggttaccaccgctggcgatggtctggaatgcctgcgccacttcgattggcgttaagttcaacgcccccagcagcattgccggaaccggatgcaactgatctttcggtacgcccagtttaatccaggtctccgtaaccgcaggcagccccagcgccatccccagatttaccgtcggcacgttcatcgaacgggtcaacgcatccaccagcatcactctgccgctttcgctataacgacggtcatcattctgcggtgaccagacctggccattcggctgacgcagcgcaattggcgcatccgcaatccacgtattcagacgatagattttcggctggcttaaggccgtcagataagtcgctggttttgcaagggaaccaatcgaacgacgcgcctgcatcgcacggttgtagcccgcaaactgcggctcagaacctccgaccatcgcacgaacttcaccactaaagcggtcgacgaccacaatcgcagtttcaagatcgctcaacttacgctgtttcttcagtgccggaatgccttccacggcggctttttctgccgcgtcctgggccaccgagtcaaaggtagtgaagatcttcacgccggagagatcttttaccttatcgcccagttttgcctgcagctcctgacgcaccagttgcataaaggctggctgaggagagatcaccccaccgcgcggctgaacccccagcggacgggcactcaacatgtcatagagttcttgatcaataatctgttgctgttgcagcagacgcagcaccagattacgtcgctccagcgccagttttgggttacgccacgggttgtagatggacgcccctttcaccataccgactaacagcgcctgctggtcgaggcttagctcttctaccgggcgaccaaagtaatacaagcttgccagcgggaagccgcggatttcgttgtcgccgctctgaccgagatacacctcgttcatatacagctcaagaatacggtctttgctgtaacgcgcgtccatgatcagcgccatgtaagcttcgttcgctttacgccagtaagaacgctcgctggagaggaacaggtttttcaccagctgttgcgtcagcgtactcgcaccctgtaccgtgcgtccggcggtcaggtttgccagcaccgcacgtccgattgagtagagactgattccatcatgctcgtaaaaatgacggtcttctgtcgccagcaaagtatccaccagcaaatccgggaaaccactgcgcggcacaaacagacgctgctcaccgtttggcgaagagatcatggtgatcagacgcggatcaagacggaagaaaccgaactgacggttgttctccatattgacgatcgtcgccagatgatcgccatcaaaggtcagacgcgcgcgcacctgtccttctttactgtccgggaaatcaaacggacggcgaatcatctcaatgctgttggcctgcacggtaaattcgccaggacgggtcattttcgacacctgacgatactgggtcgcctccagcagcttcaccatctcgttcttgctgatggtcatgtctggctcaagattgaccattcggccataaactgccgcaggcagttgccagaccttgccatcaatacggctacgaattttttgatcgagataaacgccgtaaatggcgatcagcacggcaaaaacgatagccagttttagcagtagccatagccagccgcgtttgccacgaggcttacgccctttgcctttgcccttacctttgcgcggcatcggttcttcatcctcatagtcatcataatcgtcgtaatcatcgtcatcttcgtaacgacgacggcttaccttttgtttgaccggacgcgtcggtttccctttgcgtccaattggctcgcggtcattcccggccatgctttttctccgcaatattcaggcgcaaaagcccgattttctgttcttctgttacaagacagaagaagatatctctcaaaatttgtgctcgatcggtcccctctcccttgagggagagggttagggtgagggtgaacgtgcgcgctgatgccctcaccccggccctctcccacagggagagggagaaaaccaaccttacgaatactttttcgtccgtcgcgtcggtgcagtatttgccgggtcgtccggccagacatgtttgggataacgccctttcatctctttttgcacctcacggtacgctcctttccagaaggcgctcaaatctcgtgtgatttgtaatggcctttgggcaggtgaaagcaactccagcaccagcggcacgcgcccctgggcgatcgtcggattggtggcctcgccaaacatctcttgcattctcaccgccagcgcgggcgggttatcttcatgataacgaatggcgatccggcttcccgtcggcacagtgtaatgcgcaggcaattcactatccagacgttgctgcattccccaatcaagtaatccgcgtagtgcctgataaatgtcgagtgatttcaggccgcgtagtgaatgtacgccagtcatatgtggcagcagccacgtttccagcgctgccaataaactttcatcatcaaccgctggccagtcatattccggcaaccactttgcggcgcataacaaacgcaagcgtagctgttccgcttccgccgtccagttgagcacgcttaaacctttatcacggatgccattaagcatcgcctgatgcaactcgtcttctgacggtttcgccagcggctgcactttcaccgtcaactgaccgatttgtagccgacgccaggctttcagcgtaccttgcgcgtcatcccactccacagtgtcagactgctgtaccagctgcgggcagcgttgtactaactcatcaatatcgaccagcagcgccagtaaaatccgcgcatccggcgaggcgctgccctgcaataataacggtgcgatcaaccattcgtggcggcttagcgcgtcgttggcatcgagcatcgctcccatgccgtttgccagttgatagcgtccatcttgcccacggcgacgagcaatgcgatcggcaaacgccccggcaagtagcggcgcgataagcgaactgtctgcctcaccgccacgtacgtttaagcgttttaacagttgctgactacgttgctgccaggctggttgattgcgcgaaaacgccacgcccaggtcactattgcccatccgtggcggctcttcgagaatggcggcaatttttgccgcggtagcagcttcgtcgtcgttcttcgcgctaaccagcattgccgctaaacgcggatcgttacccagcgctgccattttttgcccttgcgcactaagccgttcaccctccagtgcccccagcatttgtaacagacgtttcgcggccagtagattcactactggcggttgatccagccagctcatctgcgccggatcgctgcatccccattgcagtaattccatcagcaaaccggaaagatcgctttgtaagatctccggttcactttgcgccgcggcgcgttctgcttgttctttggcgattaaatgcaggctgatacccggctccagacgcccggcgcgcccggcacgctgcgtcatggatgcctggctaacgcgttgagtaatcagtcgcgtaagccccgtgcgcggatcaaaacgcgccacacgctcctgggcacaatccaccaccagacgaataccttcaatggttaaactggtttcagcaatattggtcgccagcaccactttgcgcatcccttgcggtgccgggaggatcgcttttcgctgatcgttcagcgacaacgcgccatacagcgggcagagcaatacatcactgccgatgcgcgaagccagttgttcctgcacacgctgaatttctccgacgccaggtaaaaataacagtaatgatccgctttcctgacgcagcatttcagcggtggctaccgcaacggcatcgtcaaaacgctgatgcgcgggcagcggtaaataacggcgttcaaccggaaacgagcgcccttctgagatgacgacaggcgcttctggcagcatttgctgcaagcggtcgttgtccagggtagccgacataatcagcagtttaaggtcatcacgcagaccttgttgcacatcgagtaacagcgccaacgccaaatccgcctgcaagctgcgctcatgaaattcatcaaggatcaccagtccaacaccgctcagttccgggtcacgctggatcatgcgcgtcagcacgccttcggtaaccacttccaggcgggtattcggcccgacgcagttttgcgcacgcatccggtagccaacggtatcgcctggcttttcgttaagcagctccgccagccgttgcgcgacgttacgcgccgccagacgacgcggctccagcaggataattttcccgttaatgccgggatgcgccagcagttgcagcggcagccaggttgatttcccggccccggtcggcgcacttaataatacctgcggcgcacaatcgagagcggtaagtaattcaggtaagacggcagcaacgggcaacgacgacacaaaacgctccagagggttaacattcttcgcgccacattgtagcatcgcggtaattcataaccgagtgcctcacatgtctgaaccgcaacgtctgttctttgctatcgacttacctgcagaaatccgcgaacagattatccattggcgcgccacacacttcccacctgaggcgggacgtccggtcgccgccgataatttgcatctgactctggcatttttaggcgaagtgagcgccgagaaagagaaggcgctttctcttttagccggacggattcgtcaacctggtttcacactcacgcttgatgacgccggacaatggctgcgttcgcgtgtggtgtggttagggatgcgtcagccgccacgcggcttaatccagctggcgaatatgctccgttcacaggctgcccgcagcggttgttttcaaagcaatcgtccgtttcatccacatattaccttattgcgcgacgccagcgaggcggtgacaatcccgccgccaggttttaactggtcgtatgcggtgacggagttcaccctttacgcctcctcgtttgcccgtggacgcacacgctacacgccgctaaaacgctgggcgctaacgcaataacaaggattgtcgcaatggaattttctccccctctacagcgcgcgacgctaattcagcgttacaaacgttttttagccgatgtgatcacacccgatggtcgcgaattaacgctacactgcccgaatacgggtgcgatgaccggttgtgcaacgcctggcgataccgtctggtattcgacttcagacaacaccaaacggaaatacccacacacctgggaattaactcaaagccagagcggcgcatttatttgcgtcaacacgctttgggctaacaggttgacgaaagaggctatccttaatgaatcaatttcagaactgtcaggctatagctcgctgaaaagcgaagtaaaatacggcgcagaacgcagccgtattgactttatgttgcaggcggattcgcgtccagactgctatattgaagtgaaatcggttacgttagcggagaacgaacagggatattttcccgatgcggtcactgaacgaggtcagaaacaccttcgggagttgatgagcgtagcggctgaaggccagcgtgcggttatctttttcgccgtgctgcattcagccattacacggttttcacccgcgcgccacatcgatgagaaatacgcgcaactattgtcagaagctcaacagaggggggtagaaattctggcttacaaagcggaaatttctgctgaaggcatggctcttaaaaaatcactgccggttacattgtagtaaagtaagtaactggttaatttacattctggtcgcgtgcgcaaatacgcttttcctcacacagttgtcaagtgttacgtttagataattgctatccggaaaagcatctgctatttatagcggcctcatttttcccccgaacatggggatcgatagtgcgtgttaaggagaagcaacatgcaagaagggcaaaaccgtaaaacatcgtccctgagtattctcgccatcgctggggtggaaccatatcaggagaagccgggcgaagagtatatgaatgaagcccagctggcgcacttccgtcgtattctggaagcatggcgtaatcaactcagggatgaagtcgatcgcaccgttacacatatgcaggatgaagcagccaacttcccggacccggtagaccgtgcagcccaggaagaagagttcagcctcgaactgcgtaaccgcgatcgcgagcgtaagctgatcaaaaagatcgagaagacgctgaaaaaagtggaagacgaagatttcggctactgcgaatcctgcggtgttgaaattggtattcgccgtctggaagcgcgcccgacagccgatctgtgcatcgactgcaaaacgctggctgaaattcgcgaaaaacagatggctggctaattacagccgttccatcacgtttaccacaggcgggaaatgctcccgccttattttttgttcaaagagatgacagacacacagtatattggccgcttcgccccctctccttccggcgagcttcattttggctctctgatcgccgcgctcggcagctatttgcaggctcgcgcccggcaaggtcgctggctggtacgcatagaagatatcgacccgcctcgtgaagttcccggtgccgcagaaactatcctgcgccagctggaacattacggtctgcactgggacggcgatgttctctggcaatcgcaacgtcacgacgcctatcgtgaagcactcgcctggttacatgaacaaggactaagttattactgcacctgtacgcgtgcgcgtattcaaagcattggcggtatttacgacggtcattgccgggtgttgcatcatggaccagacaacgccgcagtgcgtatccgccagcagcatccggtcacgcaatttactgaccagctgcgcggcattattcacgccgacgaaaaactggcacgggaagattttatcattcatcgccgtgatgggttgttcgcctacaacctggctgttgtggttgatgatcatttccagggcgttacagaaatagtgcgtggggctgatctgattgaaccaacagtaaggcaaatctcgctgtaccagctttttggctggaaagtgccagattacattcatctgccgctggcgcttaatccacaaggcgctaaactttccaagcagaatcatgcgcctgcgttgccgaaaggcgatccacgcccggtactaatcgcggcacttcaatttctggggcagcaggcagaagcacactggcaggatttcagcgtcgagcaaatccttcagtcagccgtcaaaaactggcggcttaccgccgtgcccgagtcggcaattgtaaattcaacattctcaaatgcgtcatgctgagctatgattagccgctatttttttgtcctgaatgatgtttgacactaccgaggtgtactatttttacccgagtcgctaatttttgccgcaaggtgctaagccgcgaggaaagcgaggctgaacaggcagtcgcccgtccacaggtgacggtgatcccgcgtgagcagcatgctatttcccgcaaagatatcagtgaaaatgccctgaaggtaatgtacaggctcaataaagcgggatacgaagcctggctggttggcggcggcgtgcgcgacctgttacttggcaaaaagccgaaagattttgacgtaaccactaacgccacgcctgagcaggtgcgcaaactgttccgtaactgccgcttggtgggtcgccgtttccgtctggctcatgtaatgtttggcccggagattatcgaagttgcgaccttccgtggacaccacgaaggtaacgtcagcgaccgcacgacctcccaacgcgggcaaaacggcatgttgctgcgcgacaacattttcggctccatcgaagaagacgcccagcgccgcgatttcactatcaacagcctgtattacagcgtagcggattttaccgtccgtgattacgttggcggcatgaaggatctgaaggacggcgttatccgtctgattggtaacccggaaacgcgctaccgtgaagatccggtacgtatgctgcgcgcggtacgttttgccgccaaattgggtatgcgcatcagcccggaaaccgcagaaccgatccctcgcctcgctaccctgctgaacgatatcccaccggcacgcctgtttgaagaatcgcttaaactgctacaagcgggctacggttacgaaacctataagctgttgtgtgaatatcatctgttccagccgctgttcccgaccattacccgctacttcacggaaaatggcgacagcccgatggagcggatcattgaacaggtgctgaagaataccgatacgcgtatccataacgatatgcgcgtgaacccggcgttcctgtttgccgccatgttctggtacccactgctggagacggcacagaagatcgcccaggaaagcggcctgacctatcacgacgctttcgcgctggcgatgaacgacgtgctggacgaagcctgccgttcactggcaatcccgaaacgtctgacgacattaacccgcgatatctggcagttgcagttgcgtatgtcccgtcgtcagggtaaacgcgcatggaaactgctggagcatcctaagttccgtgcggcttatgacctgttggccttgcgagctgaagttgagcgtaacgctgaactgcagcgtctggtgaaatggtggggtgagttccaggtttccgcgccaccagaccaaaaagggatgctcaacgagctggatgaagaaccgtcaccgcgtcgtcgttctcgtcgtccacgcaaacgcgcaccacgtcgtgagggtaccgcatgacagtggcgtatattgccataggcagcaatctggcctctccgctggagcaggtcaatgctgccctgaaagcattaggcgatatccctgaaagccacattcttaccgtttcttcgttttaccgcaccccaccgctggggccgcaagatcaacccgattacttaaacgcagccgtggcgctggaaacctctcttgcacctgaagagctactcaatcacacacagcgtattgaattgcagcaaggtcgcgtccgcaaagctgaacgctggggaccacgcacgctggatctcgacatcatgctgtttggtaatgaagtgataaatactgaacgcctgaccgttccgcactacgatatgaagaatcgtggatttatgctgtggccgctgtttgaaatcgcgccggagttggtgtttcctgatggggagatgttgcgtcaaatcttacatacaagagcatttgacaaattaaacaaatggtaatttatttatattgcgaatataaatattttctgaaaatcatatctcatctctttccttaattacgattttagtttaaacatctctttgcggaaataatataacttcctataaataaatatcaatcccatctccataccctaaccaattgcacttgtgaacttatttttacttaattttgaattaagtaaatttaatttgttcaaaagcttctaaagtgcacaataggcgacctaatgaacaatggttgtaaatttgggtaacaaatatcattgctcattaatatctaacatttgtttctcctatttgtgtcatgaatagtcattcttcaaacatgtagtctgactaatggaattttattaaaggatttttatgtctaaaaaattaggttttgccctgtctggtcttatgctggcgatggttgcaggtactgcttctgctgatatggacggcggtcagttaaatatcagtggtctggttgttgataacacctgtgaaacccgcgttgacggcggtaacaaggatggtctgatcctgctgcaaaccgcaaccgttggtgaaatcgatgctggcgtactgaatgacaccgttggcgctaaagctaaacctttcagcatcaccgttgactgcagcaaagcaaatccgaatccaggtagcacggctaaaatgaccttcggttctgttttctttggtaacagcaaagggactttgaacaacgacatgtctattaacaacccatctgacggcgttaatatcgctctacacaatattgatggttccactatcaaacaggttcaaattaacaaccctggcgatgtgtatactaaagccctggatgcaacgacaaaatctgctgtttatgattttaaagcgtcttacgttcgtgccgtcgcagaccaaacagcaactgctggttatgtaaaaactaacactgcatacaccattacttatcagtaagtattcaccagttaaattgattgaatgaatatacagggaataataatttctattttatattattccctgttttaattaactctatcagggatggtttatgttttttaacaccaaacatacaacagctttatgcttcgtaacctgtatggcttttagttcatcgtctattgcggacattgtcatttcgggtactcgcgtaatatataaaagcgatcaaaaaagtgtcaacgtacgtctggaaaataaagggaataacccgttgcttgtccagagttggttagatactggcgatgacaacgctgagcctggcagtattacagtcccttttactgctacgccgccagtatcgcgtattgatgccaaacgtgggcaaacaatcaaattaatgtacacagccagcacctcactgcctaaagacagagagagcgtgttctggtttaacgtactggaagttccaccaaaaccagatgcagaaaaggtcgcgaatcaaagcctgctgcaactggcatttcgcacacgtataaaacttttctatcgcccggatggattgaagggaaatccctctgaagccccgttagccctgaagtggttctggtcaggttcagaaggtaaggcgtcattacgagtgaccaatccaaccccttactacgtctcttttagcagtggtgatttagaagctagcggtaaacgctatccgattgatgtgaaaatgattgcaccatttagtgatgaggtcatgaaagtcaatggccttaatggcaaagcgaattctgcaaaagtgcatttttacgccattaatgactttggtggcgcaattgaaggtaatgccaggctgtaatcaggcaaggatataattccgcaggaagcatagcgtgactatagaatatactaaaaattatcatcatctgacccgtatcgccacgttttgcgcgctgctgtattgcaatactgctttcagtgctgaactcgttgaatatgaccataccttcctgatggggcagaatgcatctaatattgatctcagccggtacagtgaaggtaaccccgctataccgggtgtttacgacgtcagtgtttatgtaaacgaccaaccaatcattaaccaaagtattacatttgtcgcaattgaaggaaaaaagaacgcccaggcttgtatcacattaaagaatttattgcagtttcatattaattctcccgatataaataacgaaaaagccgttctgcttgccagggatgaaacgctcggcaattgcctcaatttgacggaaattatccctcaggcttctgttcgttatgacgttaacgatcaacgtctggatatagacgttcctcaagcctgggtaatgaaaaattaccaaaactatgttgatccatcgttatgggaaaacggcattaatgcggccatgttgtcatacaacctcaacggatatcatagtgaaacccctggtcgaaaaaatgaaagcatttatgctgcatttaacggtgggatgaatttaggtgcatggcgactgcgtgcctcgggcaactacaactggatgaccgattctggcagtaattatgattttaagaatcggtatgttcagcgtgatatcgcctcgctgcgttctcaactcattcttggtgagtcttatacgacgggcgaaacctttgattccgtcagtatccgaggcattcgtttatacagtgacagccgcatgttgcctccgactttagccagctttgcgcctatcattcatggcgttgccaataccaacgccaaagtcactattacgcaaggtggctataagatttatgaaacgacggtgccgccaggcgctttcgtcattgatgatctgagtccgtcagggtacggcagcgatcttattgttaccatcgaagaatccgatggctcaaagcggacattctcgcaacctttctcatccgttgttcaaatgttacgccctggcgttggacgttgggatattagcggcggtcaggttttaaaagatgatattcaggatgagcctaatttatttcaagcaagctactactacggcctgaataactatctgacgggttataccggtattcagataaccgataataactataccgctggtttgttaggtcttggtctgaatacttcagttggtgcattttctttcgatgtgactcattccaatgttcgtatcccggatgataaaacataccaggggcaaagttatcgtgtttcctggaacaagttattcgaagaaacaagtacttcactgaatatcgcggcctatcgctattcgacacagaattaccttggtcttaatgatgcactaactctaattgatgaagtgaaacatcccgaacaagatcttgaaccgaaatccatgcgtaattactcacgcatgaaaaatcaggttacggtcagtattaaccaaccgttgaaatttgagaaaaaagattacggttcattttatctttccggaagttggtccgattactgggcttccggacaaaatcgtagcaattactctattggctacagtaacagtacatcctggggcagctacagtgtcagtgcccagcgttcatggaatgaagacggcgacactgacgatagcgtttatcttagtttcaccattccaattgaaaaattacttggcactgaacaacgtacttcaggtttccagagtattgatactcaaataagcagtgactttaagggtaataaccaactcaacgttagcagcagtggctatagcgataacgctcgcgtcagttatagcgtgaatactggctatacgatgaataaagccagcaaagatttgagttatgttgggggttatgccagctatgagtcaccatggggaacgctggcaggttcaatttctgcaaatagcgataacagccgtcaagtttctctcagcaccgacggtggttttgtattgcatagcggtggactgactttcagtaatgatagttttagcgactccgatacactggcggtagttcaggctccaggtgctcaaggagcgcgaataaattatggcaacagtactatcgatcgatggggttatggtgtcaccagcgctctttctccttatcatgaaaaccgtatcgcgctggatatcaacgatcttgagaacgatgttgaattaaaaagtaccagtgcagtagctgtaccgcgtcagggttcagtcgtctttgctgattttgaaaccgtgcaagggcaatcagccattatgaacatcacacgaagtgatggtaaaaatattccatttgctgcagatatttatgatgagcaaggcaatgtcattggtaatgttggacagggtgggcaagcatttgttcgtggtattgagcagcagggaaatatcagcattaaatggctcgaacaaagtaaacccgtaagttgtcttgcgcattatcaacaaagcccagaagcagaaaaaatagcacaatctattattctgaatggaattcggtgtcagattcagtaactacaagggacgtcaaatgataaaaacaacgccacataaaatagtgatactgatgggaatattattatcaccctcagtatttgcaacggatattaatgtagagtttacagccactgtcaaagcgacaacctgtaacatcacacttactggtaataacgtcacgaatgatggcaataataactacacattgagaatccctaagatgggtctggataagatcgcgaataaaacgacagaatctcaggctgattttaaactggttgccagtgggtgcagcagtggcatcagttggattgataccactctgaccggaaatgcatcatcaagctcacctaagcttattataccgcagtctggtgattcatcttcgacgacaagtaatatcggtatgggtttcaaaaaacggactactgatgatgccactttccttaaacctaacagtgcggaaaagatacgctggagcacagacgagatgcagcccgataagggtcttgaaatgaccgttgcgctacgtgaaacagatgcagggcaaggcgtaccggggaattttcgtgcactggcgacgtttaatttcatctatcaataagaaggataattatgatgacatttaaaaatttacgttatggattatccagcagtgtcgttttggctgcctcattgttcagcgtactctcttatgcggcaacagacagtattggactgaccgttattactactgtagaaatgggtacttgtaccgctacattagtaaatgactctgatcaggacatttctgttgttgattttggtgatgtatatatttctgaaatcaatgccaagaccaaagtaaaaacattcaaactcaaattcaaagactgtgcgggtatccccaataaaaaagcgcaaataaaattaaccaagcgagccacatgcgagggaactgctaatgacggtgcggggtttgcaaatggttccacagccgcagataaagcaagtgctgtcgccgttgaagtctggagcactgtaactccggcaacagggagtgcaacacaatttagctgtgtaacaccagcatcacaagaggtaacaatctccactgcagccaatgcggtcgtttattatccgatgagtgcacgcctggtcgtggaaaaaaataaaaccgtaaacaatgtcactgcgggtaagttttctgcaccagccacatttacagtaacctataactaacagacttacagattcaggaactatatatgcatcccactcaacgtaagctgatgaagagaataattctgtttctgtcattactgttttgcatcgcctgtccagccattgctggacaggatattgaccttgttgccaatgtaaaaaacagcacctgcaaaagcggaatcagtaaccagggtaatattgatcttggcgtcgttggggtgggatatttttcaggtaatgttactcctgaaagttatcaacctggtggaaaagagttcactatcactgtatccgactgtgcattacagggaactggcgatgtgctaaatcagttacatattgattttagagcccttagcggtgtcatggctgctggctctaggcaaatatttgctaatgaaatttcgtcaggagcaagtaatgtaggagtagttatattttctactcaggattcggcgaatacattcaatgttcttaatgcttcaggcggatctcgttccgtttatccagtaatgtcggatgacatgaatggttcatcctggaaatttagcacccgaatgcaaaaaatcgatcctgcattgagtgttacatctggtcaacttatgagccatgtgttagtggatatttactacgaataacaaacaaaaacagcgcaaaccataacaataaagaaacattggagtaaaaatgaagactatcttcaggtacattctttttttagcactgtattcttgttgtaatacagtcagtgcatatacaagttttattgtgggaaataatgcaggagttgataactatcgaggcccctccactgccgcacagatgacctttaattacacatcaacagcaagcaacttggttttttataaacccacgcagctcggcccgactggggtaaaaatgtactggtcatacctggatacaggtaccggtggtggtattctttactgcaatacatctggcagagcgaatcctggtccaataactattgaaaatgccatggtctattcaggtaaagattatggcggacataaactatttaatacatctgttcctggtctgtattacaccatgttaatatcaagggtctggtctgcatacgatacaataactgacattcaatcgccaggaatctatatcggagatccttccaaccaagaatttttcttttccgtcacagacagcgatctacaaactaagggttgcaacaaagcagacgactacgataagttttgggctattggtggtatagtacacaacataactgttgaattttatacagatactaatttcgatcctacacttaatcagcaagtccagttatccagttcatcaaattacctttattcgtttaaggcctacagtcctggtacaaaagttgtagatcacagcaaccacatttatgtcaatttcacactgaataatgtcaaattaaccttaccaacatgttttacctccatacttaccgggccatcagtcaatggttcaacggttagaatgggagaatatagctctgggacaattaaaaatggcgcttcacctgttccctttgatatctcgcttcagaattgtattcgtgtgcgtaatattgaaacaaaactcgtcactggaaaagtaggtactcaaaacacacaactgcttggtaatacgcttactggaagcactgccgccaaaggcgttggcgtactcattgaaggtttagcaaccagtaaaaatccgctaatgacattaaaacctaatgatacgaattctgtttatatagattatgaaaccgaagatgacacctccgatggggtttaccctaatcaaggtaacggcacatcacagcctcttcatttccaggcaacattaaagcaagacgggaatattgctatcgaacccggcgaatttaaagccaccagtactttccaggtaacctatccctgataacgtagcagcactgtcaccttctggcagtgctgctacggataaatcattgcccccaccaatgtgactgataaaatgccagacagcgcaacatcaatttatcaggatacgttatgaaaccgaccaccatctccttactgcagaagtacaaacaggaaaaaaaacgtttcgcgaccatcaccgcttatgactatagcttcgccaaactctttgctgatgaagggcttaacgtcatgctggtgggcgattcgctgggcatgacggttcaggggcacgactccaccctgccagttaccgttgccgatatcgcctaccacactgccgccgtacgtcgcggcgcaccaaactgcctgctgctggctgacctgccgtttatggcgtatgccacgccggaacaagccttcgaaaacgccgcaacggttatgcgtgccggtgctaacatggtcaaaattgaaggcggtgagtggctggtagaaaccgtacaaatgctgaccgaacgtgccgttcctgtatgtggtcacttaggtttaacaccacagtcagtgaatattttcggtggctacaaagttcaggggcgcggcgatgaagcgggcgatcaactgctcagcgatgcattagccttagaagctgctggggcacagctgctggtgctggaatgcgtgccggttgaactggcaaaacgtattaccgaagcactggcgatcccggttattggcattggcgcaggcaacgtcactgacgggcagatcctcgtgatgcacgacgcctttggtattaccggcggtcacattcctaaattcgctaaaaatttcctcgccgaaacgggcgacatccgcgtggctgtgcggcagtatatggctgaagtggagtccggcgtttatccgggcgaagaacacagtttccattaaggagtcacgttgtgttaattatcgaaaccctgccgctgctgcgtcagcaaattcgccgcctgcgtatggaaggcaagcgcgtggcgctggtgcctaccatgggtaacctgcacgatggccatatgaagctggtcgacgaagccaaagcccgcgccgatgtggtcgtcgtcagtattttcgttaacccgatgcagttcgaccgcccggaagatctggctcgttatccacggaccttgcaggaggactgcgagaagctaaacaaacgtaaagtggatttagttttcgccccttcggtaaaagagatctacccgaacggtactgaaacccacacttacgttgacgttcctggcctttcgaccatgctggaaggtgccagccgtccgggacattttcgcggcgtttcgactattgtcagcaagctgttcaacctggtccagccggacatcgcctgcttcggtgaaaaagattttcagcaactggcgctgatccgcaaaatggttgccgatatgggcttcgatattgagattgtcggtgtgccaattatgcgcgccaaagacggtctggcgctaagttcccgtaacggttatctgacggcggaacaacgcaaaattgcgcctggtctgtacaaagttttaagttcgattgctgacaaattgcaggctggggaacgggatctcgatgaaattattaccattgcggggcaagaactgaatgaaaaaggcttccgcgccgatgatattcagattcgcgatgccgacacattgctggaagtttctgaaaccagcaaacgggcagtaattctggtagccgcctggcttggcgatgctcgcctgatcgacaacaaaatggtcgagctggcgtaatacttaactggcgctacggctgatggcgccagttattaatttaccccacgtcatctgtcataacacaggtaacttaaataaggttaattaccttatcaatctcagcaagaggtaaatttgccatctctgcaacgtcttcccgagacattcctttactcagaagacgctgggcgaattcctgacttacttcctgtcttccctgctgaatccccttctcaatccctttctcttcaaaccactgcgccagcgtcatcatagactcccctcccgtttccctgtctctcaacacaccgtaaaacaaatccgcttgttcagtatgaccgcgttgcagcatatagttttgcatggcaactaactgacttccgctagtgtacccttcgtcgatcagcgtgaccagttgctcaagcaataacattaagtcgcgctggcgaatatgtttttgcagtagttcgagaatcgcaatccgccgatgttgcatgatttcgtcatccggtgtgatggtgatatccaccagcgggaaaggactgttatagacgcgtcgcgccagctccggcgagtaaaacatatcaaaccagcacattgatagcggataaggtgtggcctcgccctgataaaacagtatcggcaccaccagcggcagcttatcgtggtcagcctccagatgccggtgcatggcggctatagaataacgcatcatgcgaaaggccattttcttatccggcttgctttggtgttcaatcacaacatgcagataaccgggattgccctgcatttgcacggaatagagcacgtccgtgctgtgtcctttcaggctctcttcaatgaaactccccgactctaaatgaagcgtgttgaggtcacaaagttcgcgtaattccactggcaaatgtatctccagaaagtcgcgagccgtctccgcatgcattaaaaattgtttaaataccgcgtcatgcggtgtggtactcggtgcatccatcttccctgtcttccgtgtggctttgcgtgaaggcagtatccagtcaaggcgcgctatcgtcagccacctctttattgtttaccgagcagcgttcagagaaatatcaattcgttacaggcgatacatggcacgcttcggcgcggtacgcaaactgctgacgcaaatgccgtcagatgagtagacactaaacaaaaatcgggcaatactgcgtgagaatttcctcaaagcaggcatcgcctgcttcgttaacgacagggtagaaaggtagaagttatgattcgcacgatgctgcagggcaaactccaccgcgtgaaagtgactcatgcggacctgcactatgaaggttcttgcgccattgaccaggattttcttgacgcagccggtattctcgaaaacgaagccattgatatctggaatgtcaccaacggcaagcgtttctccacttatgccatcgcggcagaacgcggttcgagaattatttctgttaacggtgcggcggcccactgcgccagtgtcggcgatattgtcatcatcgccagcttcgttaccatgccagatgaagaagctcgcacctggcgacccaacgtcgcctattttgaaggcgacaatgaaatgaaacgtaccgcgaaagcgattccggtacaggttgcttgattgttatccctgcggctggttactcaccagccgcgacatcgtctccagcgaatccgttcttaagatataaagtcgttttagtaacaacggattatcccccggttttactttgcctttcatggttgtcaccgccaggtgaaatccggcatcgtttgctgccttcacggcgttgtcattaaatccgccaaacggatacgaaagataccagacatgcggattaaattgcgccagagcgcggcgtgaacgtgcaaaatcaaacagaatattgtgctcactacggctcagtaatatgggtcggcgataaccatctacccgatgcaaaaaatgggtatgtgactggaaatcaaatacatcgcgaatttcgttaagctcagaaacgctcataaattgcagcgattttgggttccacttctgcgggtgacgtttgatgcgtgaggtaacaataaacgccgtcgccttcatgccatattgtttcaacacaggatacgcatagcggctcaccgacttgaggccatcatcaaaggtaatcaccaccgctcgcgcagggagattgatcttattcttcacgtagccttccagctgcaccatgctcagtgtcgcgtatcccctgtcacgcagccaggccatctggttattgaaagcgcgtaccgatgtggtcgtcgaagtatggcgaaaacgggtgttttcttcgtcgcgcagaatatggtgataggttagcaccgacaggccattatcgggttgggcatccagtgcgctgatataggccagtcgatcgccaatacggatctgataccaggtttgatttaacctgtctttcagtttatgcaaaatcgggtagcgcaaattgtccgccagtaccccaaatggcgcacttcccgcactcggcgcgttatagaccggcgtatctttccaggtaactaagttctgattactcagcggcttgttgaggtcgcccaaaccgtcttcaactttttgtcgcccctgaaccggctcgagatgacctttatcgataaaacctttgccaaagccaaaattaaatgcgtaataacttgcggcagtgggctccacggcaatgatttgtccggcccgaatattccccacggtcaccatcttgtcaccaatttgcgcccagaccgcagcattttcgatggtttgcatataacgggcaggtaacgcggcactgacacttgcggtaaacagcatcagcaggagaataacagcttgtttgtacatgaaaaaataaccgagggtgaaacaacgcttttattgtagcaaaagcgccatcagaatcgcgggttaatactcatacaaattatgtttgaggacgaaaggcggatttttttgttgttggtgccaaagactactcacctccggcgcacccagttcgacaatacgctcgcgaaactctgaactggtcatggtttcacggcaagccatcatctgttcaattaacggtaacgtgacaccagaaatcacttcgcaacgggagtgtttgtggcttaataatgaagccacgcgatacggtggcgctccggctatatcggttaagaagatgacaccctcaccagagtccgcttcatgcagagcatcgcacatcatgcggctgagcatattagagcttaatccgcgccagaaattcacggcccggcactgaagaagtgccccatgttttttctccagcgcatccagtatctcttgcgcccggtcatcgtgacaggtaattacccaacctaacatcgccttcctccttagccgaaaatcagtctaccctgaccattgttgataaagggtgatagccgtcaaaactcctctcccccaaatccagaggagaggaaatagccttagctacgcaaaccacgtccacgttggatcagcgaccaacagatcaaataaaacgccacaataaagaccaccagtacgccaaaggtagtgaccagcggaacatcattgataccgaggaagccgtagcggaaaccactgatcatataaacgattgggttcaggtgcgacagcccttgccagaacggcggcaacaaagtcagtgagtaaaagaccccgcccaaatacgtgagtggcgttaacacaaaggttggcaccaggctgatgtcatcgaacgttttggcaaacacaccgttcagcaaacccgcaagggagaacaacaccgccgtgagcaccagcgttaaggcaacgaatacccacgaatgcacctgaaatggcacaaaaaacagtgaaattgccgtcaccagaatgccaacaaacagaccacgcgccacgccaccgccgacatatccggcaataatgacgtgagtcggaaccggcgctaccagcagctcttcaatattacgctggaacttggcaccaaaaaatgatgacgcaacgttggcgtaggcattggtgatcaccgacatcatgatcagccccggtacgatgaactgcatatagctgaagccatgcatatcgccaatacgcgaaccaatcaggttaccgaagataataaagtaaagggtcatggtgatgactggcggcaccagcgtctgcacccagatacgcataaagcgatggatctctttcgcccagatgctttttagcgccacccagtaaagatgcatcatgcgcgatctccttgtttttcattaaccagtgaaacaaacagctcttccagacggttagctttgttacgcatacttaatacctgaatgccctgctcacttaactgcgtaaatacgctgttgatcccctgctcacgcagcacttcaacttccagcgtcgcggtatcgaccagtcgatactgatagccatcgagcttcggtaacgggcttttcggtgcgagatcgagaataaaggtttccgatttcagcttcgccagcagcgccttcatcgaggtattttccaccagctcaccgtgttgaataatgccgatattgcggcacagcatttctgcttcttccaggtagtgtgtggtgagaatgatggtggtgcctttgtcgtttaaatccttcaaaaagccccacattgagcggcgaagttcaatatccacgcctgcggtcggttcgtcgagaatcagtagtttaggttcatgcattaacgcacgggcaatcattaaacggcgcttcatcccgccagataacatacgcgcacgttcgttgcgttttccccatagatcgagttgtttaagatacttttcgctgcggatgtacgcttctttgcgctccacgccgtagtaccctgcctgattcaccacaatttgctgcacggtttcaaacgggttgaagttaaattcctgcggcaccagtcccaactgacgtttagcgttcacgacatccttctcgagatcgtaaccaaatacgctgacccgcccggaggttttatttaccagagagctgataataccgatagtggtcgatttcccggccccgttcggcccgagaagcgcataaaaatcacccgcttcgacctgcaaatctatcccacgaagcgcctgaactccgcctggataggtttttttaagctgttgaagttccagtgcaatggtcataaatttttacttaccttacgttcttacactttatctgtggtttaaatcgtcccggagttgccctatattagccaaacgtaattatttggttacaggtcgttaacctccatgaaagacatagatacactcatcagcaacaatgcactatggtcaaaaatgctggtggaagaggatcccgggttttttgagaaactggcacaagcgcaaaaaccgcgctttctatggattggatgttccgacagtcgcgttcctgcagaacgtttaaccggtcttgagccgggcgaactctttgttcaccgtaatgttgctaacctggtcattcacactgacctgaactgcctttccgtggttcagtatgcagtggatgtactcgaagttgaacacattattatctgtggccactacggttgcggcggcgtacaagccgcagttgaaaacccggaactggggcttatcaacaactggctgctgcatatccgcgatatctggttcaaacatagctcattgctcggcgaaatgccgcaagagcgccgtctggataccttgtgtgaactgaacgtcatggaacaggtgtataacctgggccactccaccattatgcaatcagcgtggaaacgcgggcagaaagttaccattcacggctgggcctacggcattcacgacggcttgctgcgtgatctggatgttaccgccaccaaccgcgaaacccttgagcaacgttaccgtcacgggatttccaacctcaagctgaaacacgccaaccacaaataaaaatgccatgccggatgcaacacatccggcaacttcacacttactcgtccagcagaatcactttgccgatatacggcagatgacggtaacgctgtgcgtaatcaatgccgtaacccaccacaaactcatccgggatcgagaaaccgataaattctaccgggacgttcacttcacgacgggacggtttatccagcagcgtacaaatcgccagcgacttcggttcgcgcaggcttaagatctcacgcactttcgacagtgtattccccgagtcgatgatatcttcaacaatcagcacgtccttgccacggatatcttcatccagatctttgaggattttcacatcacgggtggtggacatgccgctaccgtagctggaggcggtcataaagtcgacttcatgagatacctgaacttcacggcacaggtccgccataaacataaatgagccacgcagcagacccaccagcaccatatcgctgccgctgtctttgtaacgctcagtaatctgacgacccagttcggcgatacgcgctttaatctccgcttcggggatcattacttctacagtatgtttcatatctctaaccatatgatttaaaaacaaatcacttcgcacgggcaggttttggcaccgcaacaaagcgcaagacacgcagtataccagtaaaactattcattcgcggaatctgttaataaagctcgaattgtgatgacgatcacacatgttaaaacctataattaattgctactaaaatattaatgaattgaaatggtgtctctttatggcaattaacaatacaggctcgcgacgattactcgtcacgctaacagccctttttgcagcgctttgcgggctgtatctactcattggcggaggctggctggtcgcgattggcggctcctggtactaccctatcgctggccttgtgatgctcggcgtcgcctggatgctgtggcgcagtaaacgcgccgcgctttggctatacgcagccctgctgctcggcaccatgatttggggcgtctgggaagttggtttcgacttctgggcgctgactccgcgcagcgacattctggtcttcttcggcatctggctgatcctgccgtttgtctggcgtcgcctggtcattcctgccagcggcgcagttgccgcactggtggtcgcactgctgattagcggtggtatcctgacctgggccggatttaacgatccgcaggagatcaacggcaccttaagcgccgatgccacacctgctgaagctatctcccccgtagccgatcaggactggcctgcctatggtcgtaatcaggaaggtcaacgcttttcgccgctgaaacaaattaacgccgataacgtccataatctgaaagaagcctgggtgttccgtactggcgatgtgaagcagccgaacgatccgggtgaaatcaccaatgaagtgacgccgattaaagtgggcgacaccctttacctgtgtaccgctcaccagcgcctgtttgcgcttgatgccgccagcggcaaagagaaatggcattacgatcctgagctgaaaaccaacgagtctttccagcacgtaacctgccgtggtgtctcttatcatgaagccaaagcagaaaccgcttcgccggaagtgatggcggattgcccgcgtcgtatcattcttccggtcaatgatggtcgactgattgcgattaacgctgaaaacggcaaactgtgcgaaaccttcgccaataaaggcgtgctcaatctgcaaagcaatatgccagacaccaaaccgggtctgtatgaaccgacttcgccaccgattatcaccgataaaaccatcgtgatggccggttcagttaccgataacttctcaacccgcgaaacgtctggcgtgatccgtggttttgatgtcaacaccggggagctgctgtgggcttttgatcccggcgcgaaagatccgaacgcaatcccgtctgacgaacacacctttacctttaactcgccaaactcctgggcaccagcggcctatgacgcgaagctggatctggtctatctgccgatgggcgtgaccacgccggatatctggggcggtaaccgcacaccggaacaggaacgttatgccagctcgattctggcgctgaatgccactaccgggaaactggcgtggagctaccagaccgttcaccacgacctgtgggacatggatcttccggcacagccgacgctggcggacatcaccgttaatggtcagaaagtgccagttatttacgctccggcgaaaaccggcaacatttttgtgctcgatcgtcgtaatggcgaactggtggttccggcaccggaaaaaccggttccccaaggtgcagcgaaaggcgattacgtaaccccaactcaaccgttttctgaactgagcttccgtccgacgaaagatttgagcggtgcggatatgtggggagccaccatgtttgaccaactggtgtgccgcgtgatgttccaccagatgcgctatgaaggcattttcaccccgccatctgaacagggtacgctggtcttcccgggtaacctggggatgttcgaatggggcgggatttccgttgatccaaatcgtgaagtggcgattgccaacccaatggcactgccgtttgtttcgaaactgatcccgcgtggtcctggcaacccgatggagcagccgaaagatgccaaaggcacgggtacggaatccggcattcagccacagtacggtgtaccgtatggtgtcacgctcaacccgttcctctcaccatttggtctgccatgtaaacagccagcatggggttatatctcggcgctggatctgaaaactaatgaagtggtgtggaagaaacgtattggtacgccgcaggacagtatgccgttcccgatgccggttccggtgccgttcaatatgggtatgccgatgctgggcgggccaatctccacggcgggtaacgtgctgtttatcgccgctacggcagataactacctgcgcgcttacaacatgagcaacggtgaaaaactgtggcagggtcgtttaccagcgggtggtcaggctacgccaatgacctatgaagtgaatggtaagcagtatgtggtgatctccgcaggcggtcacggttcatttggtacgaagatgggcgactatattgtggcttatgcgctgccggatgatgtgaagtaagacttgctcagattgctgacaacgtgcgcgttgttcatgccggatgcggcgtgaacgccttatccagcctacaaaattgtgcaaaatcaatggattgcacagctagcgtaggcctgataagcgtagcgcatcaggcagatttgcgtttgtcatcagtttaatgcccggagagatccgggcatatttccgaatacggtctttttataccgtaaaccctaacatcatccccgtatcttcatgctccagcagatggcagtgcgccatataagcatgttctttcggtgcatcgtgattaaacttcaccagcacttcgctgacattaccttctaccttaacggtatctttccagcccgcgcgatgagccgctggcggtttgccattttctgacaagatacggaactgcgtgccgtggatatggaacggatgcagcatcatgtcgcccacgccagagataacccaacgttcgtattgccctttcgccgccgcaaacatcggcttgttcatatcaaacgcctgaccgttgattttgttggcatggtggaaatcgaacttcccgccgtggttcatatgattcatattgccgtgccccatatggcccatcatctggctgtgatccatcccggccatcgcctgatcgccatatttctccattagcatctgcatccccatcatatcgagcatcgggtccatagagagttgcagcttgcgtaccgtcagcccttccagcgaaggtaacgcaggcaggctacttaatgtgtctggcaaagcaccggaggcactaatagcaatcggctgaatccgcattaccggatgaggcttatcaaacggcgcaatcgccatccccatctggctgaccggcagcgtcaccaggtcaaagggtttgttatcgttaacctccaccagcacttcaaaacgctcgcccatcagcaccggcagttcgctcaccttcactggttcaggtagcagaccaccgtcgctggcaatcacatacagcgggcgattgtcgctggtggcgaaattgagcgaacgggcattacagccattgagcaaacgcaggcgcagccaaccacgcggggcagcgtgttgcgggtagattgcaccgttggtcagcaacgtatcgccaaaccagcccacggcggcggtcatcacatccagttgataatcaatctgcccgtcggcgctaaatttcttatcctgaacgatcaccggaacatcatcgataccccactgttttggcagcattaatttcaggatctcgtcatcttcaatcaccaccagcccagccagccccatcgccacctgtcgcccggttttgccgtgctgatgcggatggaaccagcaggtagcggcaggttgatcaacgttcaacgtcaccgagcgcttgccacctggcggaataattccctgcgggccgccgtcgacttcacccggtacttccagcccgtgccagtgcaacgttgtctcttccgtcagttggttgtagatatcaaccgttaccgctttgccgcgctgtaatttcaccgccggccccagcagattgccgttatagccccaggtagttgcagttttcccgccaaaggtggactggcctgcgccaatagttaactgaatgcgattacgggcatcggtcgtgagcaaatcagggatcggtaacgttgggcgttctgccgcaaatactgcgcggctccacagcggcaaagccgaagccacacccagcgcgacggaatattttaagaaatcacgacgttgcatagttatttccttattcttaagcaggcgaaacaaaatcaaacgttgagcatagtccttccccttacgggaaggtcaagccgcagacacaatttaatcgacaataatggtcgtcgcctcgctcgcagtgtgctaacgtttatcttctttaagcccctggtagaagcaatgaagacgtttttcagaacagtgttattcggcagcctgatggccgtctgcgcaaacagttacgcgctcagcgagtctgaagccgaagatatggccgatttaacggcagtttttgtctttctgaagaacgattgtggttaccagaacttacctaacgggcaaattcgtcgcgcactggtctttttcgctcagcaaaaccagtgggacctcagtaattacgacaccttcgacatgaaagccctcggtgaagacagctaccgcgatctcagcggcattggcattcccgtcgctaaaaaatgcaaagccctggcccgcgattccttaagcctgcttgcctacgtcaaataatccctgatacctttttgtagaaacattgaccgtgcatccgcggtcaatgttagctattatgttgcgccctttttttacgggtgttaacaaaggaggtatcaacccatggccgaaaaaaaacagtggcatgaaacgctacacgaccagtttgggcagtactttgcggtagataacgttctgtatcatgaaaagaccgatcaccaggatctgatcatttttgagaacgctgcatttggtcgcgtaatggcgctggatggcgtagtacaaaccaccgagcgcgacgagtttatctatcatgagatgatgacccatgttccgctactggcccatggtcacgcgaaacatgtgctgattatcggcggcggcgacggtgccatgctgcgtgaagtaacccgacataaaaacgttgagtcaatcacgatggtggaaatcgatgcgggtgtcgtatcgttctgccgtcagtatctacccaaccataacgccggtagctacgacgatccgcgctttaagctggtgatcgacgatggcgtcaatttcgttaatcaaaccagccagacctttgatgtcattatctccgactgcaccgatcctatcggtcccggcgaaagccttttcacttcggcattttatgaaggctgcaaacgttgcctgaatcctggcggtatcttcgtcgcacaaaacggcgtctgctttttacagcaggaagaagccatcgacagccatcgcaaactcagccattacttcagcgacgttggcttttatcaggcggcgatcccgacctattacggcggtatcatgacttttgcatgggcgacagataacgacgccttacgccatctctcaaccgaaattattcaggcgcgttttctcgcctctggcctgaaatgccgttattacaatccggcaatccatacggcagcttttgccttacctcagtatctgcaagacgcactggcttcacagccgtcctaaggagaagataagaaattgaaaaaactgaaactgcatggctttaataatctgaccaaaagtctgagtttttgtatttacgatatctgctacgccaaaactgccgaagagcgcgacggttatattgcttatatcgatgaactctataatgccaaccgtctgaccgaaatcctgtcagaaacctgttccattatcggggctaatattcttaacatcgcccgccaggattacgaaccacagggtgccagcgtcactattctggtgagtgaagaaccggttgacccgaaactcatcgacaaaacagaacaccccggcccactgccagaaacggtcgttgcccatcttgataaaagtcatatttgcgtacatacctacccggaaagtcatcctgaaggcggtttatgtaccttccgcgccgatattgaagtctctacctgcggcgtgatttctccgctgaaggcgctgaattacctgatccaccagcttgagtccgatatcgtaaccattgattatcgcgtgcgcggttttacccgcgacattaacggtatgaagcactttatcgaccatgagattaattcgattcagaactttatgtctgacgatatgaaggcgctgtatgacatggtggatgtgaacgtctatcaggaaaatatcttccataccaagatgttgcttaaagagttcgaccttaagcactacatgttccacaccaaaccggaagacttaaccgacagcgagcgccaggaaattaccgctgcgctgtggaaagaaatgcgcgagatttattacgggcgcaatatgccagctgtttaacggctctggcggagctcccaggctccgccagatttatttacttctgctgcacgaaattgcggtaagccgccacgacttgcagaaaatcctcaacgccgcatagcgacaggctttcttcgtcgtagtagttcatcccctcttccatttcatcgccagcgaattccagttgattggcgcgaaccatcacctcttcaccgtccatccacagggtgtattcatgccctgcccgttgccaggaccgttcgctacctttcagtgcgtgcgctgcttgttccacttcatcaagcaaggccaggttttctttcacctcttcattaaaccagtgcccgaccacttcatgccccatggacatacgcacctttaccactccggtaatatcgcgcagaaattcgtaatccatagtgtgttcctctgctcccggcaatgcaccgaaatcgcattgcgccattgatgtaattatcgcagccttaccggagaaaaacagcggaacggcgatggtttagaaataaaaaaatgcccgggaatctcattcaccgggcattgtgtcgtttatgcgcagcgcgtgcgctgactttttaaaccgcagtctggaaaatcaccccatcggctttctcggtgtactgagaaagctggttgaagttcagataacggtaagtatcaacggctgttttatctacctgcgccacgtaggtctggtactcttccggcgtcggcagtttgccaatcagcgccgcaacagccgccagttccgcagaagccaggaagacattcgcgccagtacccagacggttcgggaagttacgggtagaggtggaaaccaccgttgcaccgtccgccacacgcgcctggttacccatacacagggaacagccagggatctcgatacgcgcaccactcttaccgaagacgctgtagtagccttcttcggtcaactgtgcggcgtccatacgggttggcggtgccacccacaggcgggtcggcaactgacctttatgcgcatccagcagtttacccgcagcacggaagtgaccgatgttggtcatgcaggaaccgataaacacttcgtcgatcttctcaccctgtaccgcagacagcggacgcgcgtcatccgggtcgttcggagcacacaggattggctctttaatatccgccagatcgatgtcgatcactgccgcgtattccgcatctgcatcggcttccagcagctcaggattcgccagccatttttccatgccctgaatacgacgttccagggtacgacgatcgccgtaaccttccgcgatcatccacttcagcaggacgatgttagagttcaggtattcgatgatcggttctttgttcagcttgatggtacaaccagcggcagaacgctcggcggacgcatcggttagctcaaaggcctgctcaactttcagatccggcagaccttcaatttccaggatgcggccagagaagatgtttttcttgcctttcttctcaacggtcagcagaccttgtttgatcgcatacagcggaatagcgtgtaccagatcgcgcagggtgatgcccggctgcattttgcctttgaagcgcaccagaacggattccggcatatcaagcggcattacgccagttgcggcagcaaacgccaccagaccagaacccgccgggaaagagataccgatcgggaaacgggtatgggagtcaccaccggtaccgacggtatccggcagcagcatacggttcagccaggagtgaatgacgccgtcacccggacgcagcgacacaccgccacggttcataatgaagtccggcagcgtgtggtgcgtgttcacgtcaactggcttcggatacgccgcggtgtggcagaaagactgcatcaccaggtcagccgagaagcccaggcacgccaggtctttcagttcatcacgggtcatcgggccggtggtgtcctgggaacctacagaagtcattttcggttcacagtacgcgcccggacgaatgcctttcacgccacaggcacggcctaccattttttgcgccagcgagaagccgcgatcgctctcagcgacatctttcgcctgacggaacacatcactgtgcggcagaccaagtgcttcacgcgctttggtggtcaggccacgcccgataatcagcggaatacggccaccagcacgcacttcatcaatcagcacgtcggttttcagttcgaaggtcgccagcagttcgccggtttcgtggttacgcacttcacctttgtacgggtaaacgtcaatcacgtcgcccatgttcaggttagagacgtcgacttcgattggcagtgcacccgcgtcttccatcgtgttaaagaagatgggtgcaattttaccgccgaggcacaaaccaccgccgcgtttgttcggcacatgtggaatatcatcgcccataaaccacagaacggagttagtggcggatttacgcgaagaacccgtacccacaacgtcaccgacgtacgccagcgggaaacctttctgttgcagagcttcgatttgcttgatcggaccaacaacaccaggctggtctggctcaataccttcacgggcgtttttcagcatcgccagcgcgtgcagtgggatatccgggcgtgaccacgcatccggtgccggagaaaggtcatcggtgttagtttcgccagtgactttgaagacagtaacggtcagtttttcagccagcgccgggcgattcaggaaccattcggcatccgcccaggactgcataacctgcttcgcatattcgttgcctgctttcgctttctcttctacgtcatagaagttatcgaacatcagcagcgtgtgagaaagtgctttggcagcaataggtgccagtttggcatcatccagcgcgtcgatcagcggatgaatgttgtaaccaccctgcatggtgcccagcagttcgatggctttttccggagtcagcagaggggatttggcttcgcctttcgcgatagcagccaggaagcctgctttgacataggcggcttcatcgacgcctgggggaacacggttggttaacagatctaacaggaattcttcttcgcccgcgggcgggtttttcagcagctctacaagtgcggccatttggtttgcatccaggggtttgggcgcaatcccctcagcggcacgctcagctacgtgcttacggtattcttctagcacgacggttctcctcgctctcattgtcatagtgcggcaggcgattctcttcacgctcctgtgagacagcagtttgtagggtaaatgcccagtaccgcaacgggcagaatagcaggattttgacgaggtgttaatctgtttacaaaaaagcaacataaaaaagtggctgaatcgttaaggatggtctagagattgtttccctccgtaaaaacttcgttaattcgcatggtgataatcacctttctcaacgaatcccaagattagtcaaaatttaaactaccgcctctttatactcggattcacagcacctgcgggtggcagttcgccgaccattgcgatttccttgagatccgaattatgaaaatgactttgccgtttaaaccccatgtgctggcgctaatttgcagtgccgggctttgtgccgcctctaccgggctatatataaaaagccgcacagtggaagcgcctgtggaaccgcaatcgacacaactggctgtgtctgacgctgccgcggttacgtttcctgcaacggtttccgcacctcccgtaacacccgccgtcgtcaaatccgcattcagcactgcacaaatagatcaatgggtcgcgcccgtcgcgctgtatcccgacgccctactttcgcaggtgctgatggcatcaacctatccgacaaacgttgctcaagcagtgcaatggtcgcacgataatccacttaaacaaggcgatgctgctattcaggcggtatctgaccagccgtgggacgccagcgttaaatcactggtggcctttccacaattgatggcattgatgggcgaaaacccgcaatgggtgcaaaacctgggcgatgcttttctggcccagccgcaggacgtgatggactcggtacagcgattgcggcaactggcgcaacaaaccggctcgctgaagtcatcaaccgaacagaaagttattaccacaacgaagaaagctgtaccggtaaaacagacagtcacggcacccgtcataccatccaatacagttttaactgccaaccccgtcattacagagccggcaacaaccgtcatttccattgagcccgccaatcctgatgtggtctatattcccaactacaacccaaccgtggtttacgggaactgggccaatactgcgtatccgccggtttatctgccaccaccagccggagaaccgtttgttgacagctttgtacgcggattcggctatagcatgggcgttgctaccacgtacgcactattcagcagcatcgactgggacgacgacgatcatgaccatcatcatcatgacaatgatgattatcatcaccacgatggcggtcatcgtgacggtaatggctggcaacacaacggcgacaacatcaatatcgacgtcaacaatttcaaccgtatcaccggtgagcatcttactgataagaatatggcatggcggcacaatccaaactaccgtaatggtgtgccctatcatgatcaggatatggcaaagcggtttcatcaaaccgatgtcaacggcggaatgagcgccacgcaattacctgccccaacgcgcgacagccagcgtcaggcggcagcaaatcagtttcagcaacgaacacacgccgcaccagtcattacacgagatacccaacgtcaggcagcggcacagcggtttaatgaagctgaacactatgggagctatgacgacttccacgacttcagccgtcgccaaccactgacccagcaacaaaaggacgccgctcgtcagcgttatcagtccgcctcgcctgagcagcgccaggcagttcgcgagagaatgcagactaacccgaagatccagcagcgaagagaggcagcgcgtgagcgcattcagtccgcctcgcctgagcagcgccaggcggttcgcgagaaaatgcagactaacccgcagaaccagcagcgaagagacgcagcgcgtgagcgtattcagtccgcatcaccagagcagcgccaggtgtttaaggaaaaagtacagcagcgcccactgaatcaacagcaacgtgataacgcccgccagcgtgttcaatcggcatcacctgaacaacgtcaggtttttcgggagaaagttcaggagagccgcccacaacgtctaaacgacagtaaccatactgtcaggctgaataacgagcaacggtcagcagtacgcgaacgtctctctgaacgtggagcaagaagactggaaaggtaaattgcagacgtaaaaaaagcggcgtggttagccgcttttttaattgccggatgttccggcaaacgaaaaattacttcttcttcgctttcgggttcggcaggtcggtaatgctaccttcgaacacttctgccgccaggcccacagactcgtgcagagtcgggtgcgcgtggatggtcagtgcgatgtcttcagcatcacaacccatttcgattgccaggccgatttcacccagcagctcgccgccgttagtaccgacaatcgcaccaccgatcacacggtgagattctttgtcgaaaatcagcttggtcataccgtctgcgcagtcggaagcgatagcacgaccagaagcagcccacgggaaggtggcggtttcatagctgatgcctttctctttcgcttctttctcagtcagacccacccatgcaacttctggttcggtataggcgatggacgggataactttcggatcgaagtagtgtttcttaccggcgataacttcagcggcaacgtgaccttcgtgaacacctttgtgtgccagcatcggttgaccgacgatatcgccgatagcaaagatgtgcggtacgttggtacgcagctgtttgtcaacgcggatgaaaccacggtcgtcaacttccacgcctgctttgcctgcgtcgaggtttttaccgttcggcacacgaccaatcgctaccagcacggcgtcgtaacgctgcggttcagcgggtgcttttttgccttccatcgtcacataaatgccgtcttctttcgcttcaacggcggtaactttggtttccagcatcaggttgaatttcttgctgatacgcttggtgaagactttaacgatgtctttgtcagctgccgggataacctggtcgaacatttcaaccacgtcaatctgtgaacccagcgcgtggtaaacggtgcccatttccagaccgatgataccgccacccattaccagcaggcgttctggtacttctttcagttccagcgcgtcagtggagtcccagatacgcggatcttcatgcggaataaacggcagttggatcgggcgagaacccgctgcaatgatcgcgttgtcgaagttgatcacggttttgccgttctcaccttcaacttccagggtgttagccccggtgaatttacccagaccgttgaccactttgactttgcggcctttcgccataccagccagaccaccggtcagctgattgatcactttctctttccaggtacgaatcttgtcgatatcggttttcggttcgccgaagacgataccgtgttcagccagcgctttggcttcttcgataacttttgctacgtgcagcagtgctttagaagggatacagccgacgttcaggcaaacaccgccaagggtgttgtaacgttctacgattacggtttccagacctaaatcagcgcaacggaaggcagcggagtaacctgcggggcctgccccaagtaccacgacctgagttttgatttcagtactcatcatgacctctatatatttatctccggcggtcatacccgtcgtctttcaggccgcagcggcgttagcttcacgccctcaccccagtcacttacttatgtaagctcctggggattctggcgcttgctaccttgctgcacccagaaatccatagggtatgtgaagtaataccctaaccaccaccgggtcgttctatccgtcggtattttacaaaattgttaacaatttttaaacaacaaacggcaaccgatttgtctattcgctaataacctcaatacattcatgagattaccagaaaaaagccggccgttgggccggctcttttacttacatcaccagacggcgaatgtcagacagcgtgttgttaatgatggtaatgaaacgggcaccatcagcaccgtcgatcacgcggtggtcgaaggagagagaaatcggcagcatcagacgcggcacgaactctttaccattccacaccggctccatcgcggacttggaaacgccgaggatagccacttccggcgcgttcacaatcggcgcgaagtgggtagtacccaggccgccgatgctggagatggtgaagcaaccgccctgcatttcgcccgcagtcagcttaccgtcacgcgctttcttagaaatagtcatcagctcgcgagacagctcgatgatgcctttcttgttgacgtctttgaataccggaacaaccagaccgttcggggtatccaccgccacaccgatgttgatgtatttcttcagggtcagacgctgaccgtcttccgacagcgaactattgaagcgaggcatctgctcaagagctgcagcaacggctttcatgatgaagacaaccggggtgatcttcacatccagcttacgtttcgccgcttcttcgttctgctgtttacggaacgcttccaactcggtgatatcggttttgtcgaagtgagtaacatgcgggatcattacccagttacggctcaggttcgcaccagagattttctggatgcggcccagttccacttcttcgatttcaccaaacttgctgaagtccaccttcggccacggcagcatgccagggataccaccgccagtcgctgccggagctgcttctgcacgtttgatagcttctttcacgtaagcctgaacgtcttcgcgcaggatacgacctttacggccagtgcccttcactttcgcaaggttaacaccaaactcgcgtgccagacggcggatcagcggagtcgcgtgaacataagcgtcgttttcagcaaattcagatttgccttccgctttcgcagctggtgctgctgccggggcttcagcttttgctgccggtgccggcgctgccgcttcctgtttcgcaggagctgccgcaggcgctgcgccttcaacttcgaagatcataatcagcgagccagttttcactttatcgccaacgttgactttcagttccttcacgacgcctgcaaacggcgccggaacttccatagaagctttgtcgccttctacggtgatcagtgactgttcagcggcaactttgtcgcccactttcaccatcacttcagtcacttcaacttcgtcaccgccgatatccggaacgttaacttctttcacgccagccgctggtgcaggggccgctgccggagctgcttcctgtttagcggccggagctgccgcgcctgcttcacccgcgacttcgaagaccataatcagcgagccggtagacactttgtcacccacgttcactttgatctctttcacggtgccagcaaacggagccggaacttccatagaagccttgtcgccttctacggtgatcagcgactgttcagcttcaactttatcgccaactttcaccaggatttcggtcacttcaacttcgtcgctgccgatatccggaacgttaacgtcttttgccgccgcagccgctggtgctgctgccggagctgcttctttcttctcttctgcctgagcaggtgcagcgtctgctgcaccgtcggcggaatcgaaaatcataatcagtgcgccggtctgggttttatcgccaacagagactttgatctctttaacgatacccgcctgcggagacggaacttccatagaggctttgtcgccttctacggtgatcagcgactgttcggcttcaactttgtcgcccactttgaccaggatctcggtgatttcaacttcatcagccccgatgtccggtactttgatttcgatagccattattcttttacctcttacgccagacgcgggttaactttatctgcatcgatgttgaatttggcgattgcgtcagcaaccactttcttatcgatttcgccacgtttagccagttcgcccagcgccgcaaccacgacataagaagcatcaacttcgaagtggtgacgcaggttctcacggctgtcggaacgaccgaagccatcagtacccagtacgcggtagtcgtcagccggtacgtaagtacggacctgctcagcgaacagtttcatatagtcggtagatgccactgccggagcgtcgttcatcacctgagcgatatacggaacgcgcggagtttccagcgggtgcagcatgttccagcgttcacaatcctgaccatcacgcgccagctcggtgaaggaggtcacgctataaacgtcagaacctacgccgtaatctttcgccaggatctcagctgcttcacggacgtgacgcaggatagaaccggagccgagcagctgaactttacctttgctaccttcaatagtttcgagtttgtagatacctttacggataccttcctcagcaccttccggcattgccggcatgtggtagttttcgttcagcgtagtgatgtagtagtaaacgttctcttgtttttcaccgtacatacgctccagaccgtcatgcatgatgacagcaacttcgtaagcgtaagccgggtcgtaagagatacagttcgggatagtcagcgactgaatgtggctgtgaccatcttcgtgctgcagaccttcgccgttcagggtggtacgaccggaagtaccgccgatcaggaagccacgcgcttgctggtcgccagccgcccagcacagatcgccaatacgctggaagccgaacatcgagtaatagatgtagaacgggatcatcggcagattgttggtgctgtaagaggtcgccgctgccagccaggaacaacctgcgcccagctcgttgatcccttcctgcagaatctgacctttctcgtcttctttatagtaagcaacctgctcgcggtcctgcggggtgtactgctgaccgttcgggctgtaaataccaatctgacggaacagaccttccataccgaaagtacgcgcttcgtcggcgatgatcggtaccagacgatctttgatcgacttgttcttcagcatcacgttcagagcacgaacgaaagcgatagtggtagagatctctttgctctgctcttccaacagcgcgccgaagtcttgcaggctcggcagctcaagcttctcggtgaagttcggctgacggcttggcagataaccgtgcagtttctgacgctgagcgtgcagataggtatgctcttcagaaccttccgggaaggtgatgtacggcagtttttcgatatctgcatcagacaccggcacattgaaacggtcgcggatatgacgcacaccgtccatgttcattttcttaacctggtgcgcgatgtttttaccttcagccgcgtcgcccatgccgtaacctttaatggtatgagcaaggattactgtcgctttgcctttggtttcctgcgctttcttgaatgcagcgtagattttcttcggatcgtgaccaccacggttcagtgcccagatctgctcgtcagtccagtctgcaaccagtgctgcggtttcaggatatttaccgaagaagtgttcacgaacgtacgcaccatctttcgatttgaaggtctggtagtcgccgtcaacggtttcgttcatcagctggatcagtttaccgctggtatccttacgcagcagttcatcccaacggctaccccacatcactttgatcacgttccagccagcaccttcgaagatgccttccagttcgttgatgatcttgccgttaccggtgaccgggccgtcaagacgctgcaggttacagttgataacgaagaccaggttatccagtttttcacgggtagcgatggtgatcgcacctttggattccggttcgtccatttcaccgtcaccgaggaacgcgtaaacggtttgtttagaggtatctttcaggccacggtgttccagatatttcaggaatttagcctggtaaatagcaccaatcggacccagacccatagatacggtcgggaactgccagaattccggcatcagtttcgggtgcggataggaagagaggccattgccgtgaacttcctgacggaagttatccagctgctcctgagtcagacgaccttccaggaaagcacgagcgtacacgcccggggagatgtggccctggaagtaaaccaggtcgccgccatcctgctcgttgcgtgcacggaagaagtggttaaagcacacatcataaatggttgcggaagactggaaggacgccatatggccgcccagttcgaggtcttttttcgacgcacgcagcaccgtcatgatggcgttccagcggatagctgaacgaatacggcgttccagttccagattacccggatactccggttgttcttcaacggggatggtgttgatgtagttgctgatacctgtgcctgcggctacgtttacaccgcctttgcgggcttcagcaagcagttggtcgatcagatactgagcacgctcaacaccttcttcacggatgaccgattcgatcgcctggagccagtcgcgagtttcgatcggatccacgtcatttgggaaacgttctgacatgggttattccttatctatctaataacgttgagttttctggaacctgtcccattgaactctcgccggaaagctcaataagacaggttctacgtttagttgccgcgcttttatatacgcttgatttacaacatcttctggataatttttaccagaaaaatcactaattctttcgttgctccagacgacgcagagaacgctcacggcggctctcttcacgacttctgtcgagcaaaatttcttcgataaaggccagatggcgatgcgatgcttcgcgcgcttcttccggcttaccggccataatcgcttcaaatatgcgggtgcggtgactactcaccagcggcagcatctcgcgacgcgaatagagcaattcgaagttctggcggacattctgggccaacatcggctccatacaccttagcagatgaagcagaaccacattgtgggccgcttcggtgacggcaatctgatactggagtacggcgtttgattccgcgtccagatcgccagactgctgcgccagctctatggcgtggtggagttcacggatgcgttccttgtcttcatcggtactacgcagcgcggcgtaataagcggcgataccttccagggcgtgtcgtgtttcgagcaagtcatactgtgactcaggatggtcggagagcagctccaccagcggatcgctgaagctttgccataggctgctctggacaaaagtgccgccaccctggcgacgaagcaacaagcccttcgcttcgagacgttgaatcgcctcacgcaaggagggacgggagacgtcaaactgttttgccagttcgcgttccggtgggagtttttcgcccgggcggagagtgccttcgaggatcaaaaactccagttgctgctcaatcacatcggagagttttggttggcggattttgctgtaggccatgagttcctgtcttaagccacttgccgaagtcaattggtcttaccaatttcatgtctgtgacgctaaagtaacaaagtattcaccttatgtccatacaggttttgattgaaatcatgaaactgtgcacattttaacaacttgacatatataacgtttcaaagttgtaactatgcacaaatgtagactttacgtaggaaaggagttttttaacgattattaaactataaaaatccgaattgaaccgattcacttaccaattttgtgatttttaattcaattaaaacgaatttaaattcattctacatattgagaggggttgaggctgagctttacaaacggtttctttttaagcaactcatcttcaaccatgcataaagcgggtgcattcgctgccgcataccattattcttgatctgacggaagtctttttgtaacaattcaaacttctttgatgtaaacaaattaatacaacaaacggaattgcaaacttacacacgcatcactgcgtagatcaaaaaaacaaccaccgcacgaggtttcatgatggaaggtcaacagcacggcgagcagctaaagcgcggccttaaaaaccgccatattcagcttatcgcgctgggtggcgcgatagggaccgggttattcctgggtagcgcctccgtaatacagtccgcagggccagggattatcctgggttacgccattgctggttttatcgcctttctgatcatgcgtcagctgggtgaaatggtggtcgaagaacctgtcgcaggctcctttagccactttgcttataaatactggggcagttttgccggtttcgcctctggctggaactactgggtactgtacgttttagttgccatggctgagctgactgccgtgggtaaatacattcagttctggtatccggaaatccccacctgggtttctgccgccgtattctttgtggtgattaacgccatcaacctgaccaacgttaaagtgtttggcgagatggagttctggtttgccattatcaaagttatcgcggtggtagcgatgatcatcttcggcggctggctgctattcagtggcaacggcggcccgcaggcgaccgttagcaacctgtgggatcagggtggtttcctgccgcacggcttcaccgggctggtgatgatgatggcgattatcatgttctcgttcggtggtctggaactggtggggatcaccgcagcagaagctgataacccggagcaaagtataccgaaagcaactaaccaggttatctaccgcatcctgattttctatattggttcgttagccgttctgctctcactgatgccgtggacccgcgttaccgccgataccagtccgtttgtgctgatcttccacgagttaggcgatacctttgtggcgaatgcgctgaacatcgtggtactgactgcggcgctctccgtgtacaacagctgcgtatattgcaacagccgtatgctgtttggtctggcacaacagggtaatgcgccaaaagcgctggcgtctgtcgataaacgtggtgtaccagtaaataccattctggtgtctgcactggtaacggcgttgtgcgtactgattaactaccttgccccagagtccgctttcggactgttaatggcgctggtggtatctgcactggtaatcaactgggcgatgattagcctggcgcatatgaaattccgtcgcgccaagcaggaacaaggcgtggtaactcgcttccctgctctgctttatccgctgggtaactggatctgcctgctgtttatggcggcggtactggtgattatgctgatgaccccaggaatggcgatttcggtatacctgatcccggtatggctgatcgtgttaggtatcggctatctgtttaaagagaaaaccgccaaagccgtaaaagcgcattaatctctctacgccctcacccgtacagggtgagggcaataatctttacaccaacgccccgtaaatcgtcagtagtgcaatcaccaccacgaccacgaacgaggttttcttcgccattgaaaccgctgccttcggcgtctccaccttatcgacatgcggttcacgcgccagagagaactgcgccagacgcgttaacacctgatactgcgaagtatggaaatcacccagcgaagcaaaccaggccggtaacgctttctcaccatgaccgatcaaggcatataccacacccgcaagacgaaccggcacccaatccagtacatgaagcacggcatcaatgccggactgtaaacgatgatgcggcgtctgatatcgcgccagccagtattgccatgcacgcaaaaacgcataccccatcagcgtaacgggtccccaggttccccccacaatcagccagaacagcggtgcaagataaaaacgaaagttaatccacagcaatgcattttgcagctcacgcaaatactcacgttcgtcgcagcctgccgggacgccgtgaatcatggtgagttcgccagccatcgtggcacgggcatggctatcattacgtgaagcagctgtcagataagcatgataatgaagacgaactttacctgcgccaatacacagcaaaccaatcagcagccacaccagtagcgtgggaacgttgaacaatactccctgcaatgcgcgtaacagtaaaaaagtcacgcccatcgcaataatggtcatgcctaacgtgcgcccgagagaaaaatgtttcacccgccgaaagaacgcttcaagacgatgatcaagctgccagtgctcgcccaacttaaacaggcgctcgaaaattaacaccagtaaggttgtaaatagcgtcatgttgtctccttgctgaccagcacacgaaaccgtgcccaatcaaatgcaggaccgggatcggttttccgatccggcgcaatatcacaatggcccgtcatgtttttagcgatatccggatagcaatcaatcagtgcccgcgtaaccgccgcaagctgttgatactgcgcatcggtatacgccagcgtatcggtgccttcaagctcaatcccaatagaaaaatcattgcagcgttcgcgcccctgatactgagagactcccgcatgccatgcacgtttatcgaaaggaacatactggactatttcaccatcacggcgaatcaaacagtgagcggagacgcgcaaatgggcgatctcagcaaagaaaggatgtgcctgcggatcaatagttccagtgaataatgcgtcgatccacggaccgccaaactcgcctggcggcaggctaatattgtgcaccaccagcagggtgggtgtttcgtcatccgggcggcaatcgtaatgtggtgagggaacgcggcgcgcgccaaccagccacccctgttctaacaacatgcaggatctccttatatgtggtgctaatacccggttcagagtagcatgtttctaccttatgattcgttagctatctggagttttaacatgccgcctcgccgctataaccctgacacccgacgtgacgagctgctggaacgcattaatctcgatatccccggcgcggtggcccaggcgctgcgggaagatttaggcggaacagtcgatgccaacaatgatattacggcaaaacttttaccggaaaattctcgctctcatgccacggtgatcacccgcgagaatggcgtcttttgcggcaaacgctgggttgaagaggtgtttattcaactggcaggcgacgatgtcaccataatctggcatgtggatgacggcgatgtcatcaatgccaatcaatccttgttcgaacttgaaggcccatcccgcgtgctgttaacgggcgaacgcactgcgcttaattttgtgcaaaccctttcaggagttgccagtaaggtacgccactatgtcgaattgctggaaggcaccaacacgcagttgttggatacgcgcaaaaccttacccggcctgcgttcagctctgaaatacgcggtactttgcggcggcggagcgaatcaccgtctggggctttctgatgccttcctgatcaaagaaaaccatattattgcctccggctcagtgcgccaggcggtcgaaaaagcgtcctggctgcacccggatgcgccagtagaagtcgaagtagagaatctggaagaacttgatgaagccctgaaagcaggagccgatatcatcatgctggataacttcgaaacagaacagatgcgcgaagccgtcaaacgcaccaacggcaaggcgctactggaagtgtctggcaacgtcactgacaaaacactgcgtgaatttgccgaaacgggcgtggactttatctccgtcggtgcgctaactaaacacgtacaagcactcgacctttcaatgcgttttcgctaatagttgacagatttatccgctccatcgcgggcggataatctccccttccccaactttcttcgtaacgcctcgcaaatttcttgtctttcgctgcaacgaaataaaaaacctcggaatctgctttcccgtttcgttttttgcccctcgcctgtgctgatggcgtttgccaaagtagcgccaaccaaatcaaggagcgaaacagatggacaagcaacgcggttttacacttatcgaactgatggtggttattggcatcattgccattttaagcgccattggtattcccgcttatcaaaactacctgcgcaaagccgcactcaccgacatgctacaaacctttgtgccttaccgtaccgccgtagagttgtgcgcgctggaacatggtggattagatacctgcgacggtggcagcaatggcattccctcgcctaccaccacccgctatgtttcagccatgagtgtggcaaagggcgtggtgtcgctgaccgggcaagaaagtctcaatgggctaagcgtcgtcatgacaccgggttgggataacgcaaacggcgtcaccggctggacgcgcaactgcaatattcaaagtgacagcgcattgcagcaagcctgcgaagatgtcttccgctttgatgacgccaactaaggagcggcaatgaatattccacagctcactgccctgtgtctgcgttatcatggagtcttgctggatgccagcgaagaggtggttcatgttgcggtagtcgatgcaccttcgcatgagctactggacgcattgcatttcgctaccaccaaacgtattgagatcacctgctggacgcgccaacaaatggaaggtcacgccagtcgcacacaacagacattgcccgtagctgttcaggagaagcatcagcccaaagcagagttgctaactcgaacgttacaatctgcgctggaacaacgcgcgtctgatattcatatcgaaccagcggacaatgcctaccgcatccgcttgcgtatcgacggcgtattgcatcctttaccggatgtttcaccggatgccggagtcgcattaaccgccagattaaaagtgctgggaaacctggatattgcggaacatcgcctgccgcaggacgggcaattcactgtcgaactggcaggaaacgccgtctcatttcgtattgcgaccttaccatgtcggggtggtgaaaaggtggtattaaggttgttacagcaggtgggtcaggcactggatgtcaacacgcttggaatgcagccgttacaactggcggactttgctcatgccttgcaacaaccacagggactggtgctggtaactggccctaccggcagcggcaaaacggtcacgctttatagtgccctgcaaaagctgaataccgctgacattaatatttgtagcgtcgaagatccagttgagatccccatagccggactaaaccagacgcaaatccatccgcgtgccggactcacctttcagggcgttttgcgtgcgttattgcgccaggatcctgacgtcatcatgatcggagagatccgcgatggcgaaacagcagagatcgctattaaagcggcgcaaactggtcacctggtgttgtctaccctacacactaattccacctgcgaaacgctggtacgtttacagcaaatgggggtcgcccgctggatgctatcatcggcgcttacgctggtaatagcccagcgtctggtacgcaaactttgcccacattgtcgccggcagcaaggggagcccatccacattccagacaatgtatggccatcgccgctgccccactggcaggcacccggttgtgtacattgctaccacggtttttatggtcgtacggccttatttgaagttctgcccataacgccggtcattcgtcagcttatttccgctaataccgacgttgaatcgctggaaacgcacgcacgacaggcgggtatgcgtacgctttttgaaaacggctgcctggccgtagagcaaggcttaaccacctttgaagagttaatccgcgtactggggatgccgcatggcgagtaagcaactctggcgctggcatggcataaccggcgacggcaatgcgcaagatgggatgctatgggcagagagccgtactttactgcttatggcactacagcaacagatggttaccccactaagcctgaagcgaatcgccatcaattctgcgcagtggcgaggagataaaagcgcggaagtcattcatcaactggcgacgctactcaaagcagggttaacgctttctgaagggctggctctgctggcggaacagcatcccagtaagcaatggcaagcgttgctgcaatcgctggcgcacgatctcgaacagggcattgctttttccaatgccttattaccctggtcagaggtatttccgccgctctatcaggcgatgatccgcacgggtgaactgaccggtaagctggatgaatgctgctttgaactggcgcgtcagcaaaaagcccagcgtcagttgaccgacaaagtgaaatcagcgttacgttatcccatcatcattttagcgatggcaatcatggtggttgtggcaatgctgcattttgttctgccggagtttgccgctatctataagaccttcaacaccccactaccggcactaacgcaggggatcatgacgctggcagactttagtggcgaatggagctggctgctggtgttgttcggctttctgctggcgatagccaataagttgctgatgcgccgaccgacctggcttatagtgcggcagaaattgctgttacgcatcccgattatgggttcactgatgcggggacaaaaactcacgcagatctttacgattctggcgctgacacaaagtgcaggcattacttttttacagggcgtagagagcgtcagagaaacaatgcgctgcccgtactgggtgcaacttctgacacaaatccagcacgatatcagtaacggtcaacccatctggctggcgctaaaaaataccggtgagtttagcccgctctgtttgcaattagtgagaacaggagaggcatccggctctctggatctcatgttagacaacctcgcccatcatcatcgggaaaacacaatggcgctggcggataacctcgcagccttactggaaccggcgttgctgatcataacgggaggaattattggtacgctggtggtggcaatgtatctgccaattttccatttaggcgatgcgatgagtgggatgggataacgctggcgtgttgctccacgccagcgttgggagattacaggttgttgaagatgcggttttcttgttcctgcacacgaataaacgtggtgcgcttggtcagctctttcaggcgtgaagccccaacgtatgtacaagctgaacgcaggccgcccaaaatatctcgcgcggtattttcaaccgggcctcgcagcggcagcttaacggttttaccttctgctgcgcgatattccgcaacgccgccaacgtgacgtttcatcgcagactcggagctcatgccgtagaacagcataaatttctcgccgttctcctcaacgatgcgaccgccgctctcttcgtggcccgccagcatgccgccaagcatgacgaaatcggcaccgccgccaaaggctttcgccacatcgcccggcgtggtgcagccaccatcgctgacgatcattccgcccagaccgtgcgcagcatcggcacattcgattaccgcagaaagttgcggataaccgacgcctgttttgacgcgagttgtacaaacagaacctgggccaatgccaactttaacgatatcggcacctgagaggataagctcctcacacatttcaccagtcactacgttaccagcacaaatggttttggtcggccacgcttcacgcgctttcgcaacgaactgcacgaagtgttcggaataaccattcgccacgtcaatacaaacgaagtttaatgccgggttcaggtcgagaatctgtttagttttttcgaaatccgcatcagacgtaccggtagaaaccatcacatgtttcagcacatcagcggaagaattgttgataaacgcttgccactcttcgacagaatagtgtttatgcacagcagtcaaaatatcaaaagaagccagcgcagaggccatagaaaatgtgcctacggtgtccatatttgcggcgataatcggcacgccggaccagctctgacctgaatgtttgaaggtgaattgacgttccagttcaacatcggaacggcttttaagagtggagcgtttagggcggatgagaacgtctttaaaacctaacttcagatcttcttcaatacgcatgtgcggattcctggggttaatggctataagggtaagagcgcaactccagtgacgctatcatacgcactaatcaatgcggcgcaagactgcgaaattgtctttttttacgctacaatcccataaatttacctggtaaatagtgagcgaacgtttcatcaatttcgctttcgtgcactcatttttaacgttttgataatcatgatgaattcccgggaatataaattatgaggtatatagttgccttaacgggaggcattggcagtggcaagagtaccgttgccaatgcgtttgctgatctcggaattaacgtcattgatgccgatattattgcgcgtcaggtggttgaaccaggtgcacctgcgctacatgccattgctgatcactttggcgctaacatgattgctgctgatggaacattgcagcgccgggccttgcgcgagcggatcttcgccaacccggaagagaaaaactggcttaacgccctgctgcatccgctgattcagcaagagacgcaacaccagatccagcaagctacttccccctatgtactgtgggttgtgccattgctggtagaaaactcactgtataaaaaagcgaatcgagtgcttgtggtggatgtcagcccagaaacgcaacttaagcgcaccatgcagcgcgatgatgtaactcgcgagcatgtcgaacaaatccttgctgctcaggcaacgcgcgaagcccgccttgccgtggcagatgacgtcattgataataacggcgcaccggatgctatcgcatcggatgttgcccgcctgcacgcacactatttgcagcttgcgtcgcagtttgtctcacaggaaaaaccgtaatgcagacccaggtcctttttgaacatccactaaatgaaaaaatgcgtacatggctgcgcattgagtttttgattcagcaactcaccgttaatttacccatcgttgaccacgctggcgcgctgcatttcttccgtaatgtcagtgaattactggatgttttcgagcgcggcgaagtccgcactgagctgttgaaagaacttgaccggcagcaacgtaaactccagacctggattggcgtgcctggcgtggaccagagccgtattgaagcattaattcagcagttaaaagcggcggggagcgtattaatttccgcgccgcgtatcgggcaatttctgcgtgaagatcgtttgattgctctggtgcgtcagcgactgagcatcccaggcggctgttgcagctttgatttacctacattgcacatttggctgcatctaccccaggcgcagcgcgacagccaggtagaaacctggattgccagcctgaacccgctcacccaggcacttaccatggtgctggatttaattcgccagtcggcccccttccgtaaacaaaccagcctgaatggtttttatcaggataacggtggcgatgccgacttgctgcgcctgaatctgtcgctcgattcacagctttatccgcaaatttccggacataagagccgttttgccattcgttttatgccgctggacactgaaaacggacaggtaccggaacgtctggatttcgaactggcctgttgctaaggagtaaaaatgtcagaaactattacggtgaattgcccaacctgcgggaaaacggtggtgtggggtgaaatcagcccgtttcggccattttgctccaaacgttgtcagctgatcgacctcggagaatgggctgctgaagaaaaacgaatccccagcagtggcgatctttccgaaagcgatgactggagcgaagaaccaaagcagtgacatttgtctgatgccgcacgtaggcctgataagacgcggacagcgtcgcatcaggcatcttgtgcaaatgtcggatgcggcgtgaacgccttatccgacctacaaaaacaaatttatcaatgagttagaaatccctttaggcctgataagacgcgccagcgtcgcatcaggcatcgtgtgcgaatgtcggatgcggcgaaaacgccttatctgacctacagacgtttaagcttcgcaattaccggttcattggctggcggaaaatcatcggcattaagaccgaccagcgacatccactcaccgggttgcccttctttaccccacggctccccttcccagcgttcgaccagccaaaaccacagtgttatatgcctgtccgggaattcatattccagtttttcaaatagcgaaaaatgttggggggtaatcccgacttcttcctgaagttcacgcaccaccgcctgttccggcgtttcacccatttcaattttaccgccgggaaactccagtttattcgccatgtgcgcatctgctgcgcgacgcgttataaagatttcattgttctcgttgcgaataatacctaccgcaatttgcagctttttcattgtcttaaacctataaaaaaggcgcagaatcctgcgccttttacttcaacagttagcttttattgcaggcggccatggcactgcttgtattttttaccagaaccgcacgggcaaggatcgttacgtcctactttgcgctctccggtttgcgccgccagtgcagctgcggctgcagagtcgtcatcctgatggctaagctgctgcatttgcgctaaacgctcggcttccatacgacgctgttgttccagctcctcaacctcttcaggcatacgtacctgaactttgctcagcgtactgataacttcatatttcaacgactccagcatcgctgcaaacatggagaacgattcacgtttgtattcctgcttcggatctttctgtgcgtagccacgcaggtggataccctgacgcagatagtccatcgctgccaggtgctctttccacagggagtcaagcgtttgcagcatgacgcctttctcgaagtgacgcatcatctcagcaccaaccacttcttctttacgctgatacacttcgatggactgcgccagaatgcgctcacgcagcgtctcttcatgcagttctggttctttatccagccactcggcaattggcaaatcgaggtcgaaatcgttcttcagacgttcctgcagccccggaatatcccacatttcttccagcgactgtggtggaatgtaggcatcaatggtcgctttgaacacatcttcacgaatgctgttaatggtttcgctcacatcgctgacatccaacagttcgttacgctgggagtaaatggcgcgacgctgatcgttagccacgtcatcatattccagcagttgcttacgaatgtcgaagttacggctttcaactttacgctgggcgttggcaatcgctttagtcacccacgggtgttcaatggcttcgcctggcttcatacccagtttacgcatcatgccggatactcggtcggaagcaaaaatacgcatcagcgcatcttccatcgacaggtagaaacgggaagaaccagcatccccctgacgaccagaacgaccgcgcaactggttatcgatacgacgggattcgtgacgctcggtaccgatgatatgcaggccacctgcttccagtaccgcatcgtgacgtacctgccagtcggctttaattttttcaatttgctctgcggtcggattttccagcgcggcaacttctgcctgccagctaccaccgagcacaatatctgtaccacgacccgccatattggtcgcgatagtcaccgcagccggataacctgcctgagcaacaatcgccgcttcgttggcgtggaatttggcgttcaggacgttgtgcttaataccggctttggtcagttcgtttgacaccagctccgatttttcgatggagatagtacccaccagcaccggctggcctttcgcagtacgttctttgatatcttcaatgatcgcctgaattttttccgcttcagtcatgtagaccaggtccggcagatctttacgaatcattggacggttggtcggaacaacgacggtatccagcttgtagattgagctaaattcgaaagcttcggtatcagcagtaccggtcatccccgccagtttttcatacagacggaagtagttctggaaggtgatcgaagccagcgtttggttttcgttctggatctgcacaccttctttcgcttccacagcctggtgcagaccatcggaccagcgacggccctgcatggtacgaccggtgtgttcgtcaacgatgataacttcaccatctttaacgatgtagtcgacgtcacgggtaaacagcgcatgagcgcgcagcgccgccgttacgtggtgcatcagcatgatgttggccggagagtacagagactccccttcatccatgatgccctctttcaccagcagttcttcaatcagcaccagaccacgttcggtcaggttcacctggcgagatttttcgtccaccgagaagtggccttcgccctggaaggtttcggagtcttctttttcctgacggatcaggtgcggaataattttattcacgcgtttatacatttccgagctgtcttctgccgggccggaaatgatcagcggtgtacgcgcttcatcgatcaggatggagtccacttcgtccaccagcgcatagtgcagtttacgctgtacacgttcttcagggctgaacgccatgttgtcgcgcaggtagtcaaagccgtattcgttgttcgtaccgtaagtgatgtcagctgcgtaagcttcgcgctttgccggtgctggcatgcccggcaggttgataccgacagtcaggccaaggaattcaaacagcggacggttgttttcggcgtcacgttgcgccaggtagtcgttgacggtaactacgtgcacgcctttaccggttagtgcgttcaggtaagcaggcagcgttgcggtcagggtttttccttcaccggtacgcatttcggcgatgcagcgttcgttaagaaccataccgccgagtaactgaacgtcgaagtgacgcataccaaagacgcgcttacttgcctcacgtaccacggcgaaagcttccgggatcagattttccagcacttcgcctttttccagacgtgcacgaaactctgcggttttccctttcagttcttcgtcggagagtttttccatctccggttccatggcattgatgatgttgaccactttgcgcatccggcgcagggtgcgatcgttacgactaccgaaaactttagttaacaatttgattagcataataaaatctcaaacgccccgcgttgcggagttaataaaatgaagtaaaggtttattgttgttaggtgaggcgttgagggccagcacggatgccttgcgcctggcttatccagacgggcgtgctgaattttgcttgtggggtaaaatgcgcataatcaatgcgataacccttttcagacggcgtgccttcctgggtcagcagcgcgctgagcgtatccagtaatgcaagatgttgcgcctgaagaggcaaagattcttcagcaacgggcagtgtttgcggtgccattgcgaaagaaagatgacggattaccgtgcgaatggcatgttgatgccagtaatcaacggaatagttcgaattcgggcggcgtgtgttcgcttccagcaaggccaattgaccaaagttaactttggctgaaggctcgtggttgcgggttgtcgcttttgcgggcgcgtttggttcggcggcgttgctgagcgcaggcaaacctaaactcgccgcaaccatccctaataagagatgcggccagaagtagcgtttaccaaactgtcgccagcgcgtcagtattccactcacgttattgccatcccgatcatattcaaacgtatttagcgcacaaatcttatcattaaagcctgcagtccacagcacgaatgaagataagttgtgcggaaaagtgcttaagaaaacagcgttcgcaccgttttttatagctcttataaaattcaaaaaaaaacgactggttcacctggccggagagagtgccagatttgccagtcgaattttatacgacagtataaatgtcgttatgccagtacagctgaaggcgctttgaaggccaacggcagttctgcgtcgtcctggaaggtcacatattcccaggcttcctgtttcgccaggacagcctgcagcagtttgttattcagtgcatgaccggatttataagcggtaaatgcaccaataatattgtgaccacacatgaacaagtcaccgatcgcatcgagcattttgtgacgcacaaattcgtcttcaaaacgcaggccgtcttcgttcagtacgcgataatcgtcaacaacgatggcacaatcgaagctgccgcccaggcacaaaccacgggactgcagatattcgatatcacgcatgaaaccgaacgtacgcgcacggctgatctggcgcataaacgcatcagcggagaagttcatcgcatagcgctggttgctggaatcaatagccggatggttaaaatcgatggtgaaatccagcgaaaaaccattgtacggcttaaattcagcccacttatcgccatcttcgacacgaacagtctctttgatgcgaacaaattttttggcgcagttcaactcgtcgataccggcgtcaagcagcaggtatacaaacggagcggcgctgccgtccatgatcgggatttccggcgcgttaacttcgataacaatgttatcgatgcccaagcccgcgagagcagcattgaggtgctctacggttgaaatccgtacatcatgctcgttgaccagacacgtacagagcatggtatcacgcacagatttggcatcggccgggaaatctaccggtggattcaagtcggtgcgacgatagatgaccccggtgttggccggcgcagggcgtaacgtcagggtgactttcttgccggtatgtaaaccgacacccgtcgcctgaacgatacgtttaagtgtcctttgtttgatcatcgtattatctcgccaaattacctatccaaccgaagtgtactatacattcggcgggccagtttagcacaaagagcctcgaaacccaaattccagtcaattcttaatcagcttgcttacgcaggaatgctgggatatccagataatccggctctttcgcagtttgcggcgcattgtcattcacgactttagcaaccggcttctgctcctgggtcagcggagccatcccatgctgctggtagcgatccatcactggctgctgaacctgcttattggtcaccagagtgatttcaggacgtttgtccatgccgatacctgtcgcaacaacggttacgcgcagctcgtcattcatatccgggtcaagagaagtaccgataaccacagtcgcgttgtcggaagcaaatgcacggatggtgttacctaccgtttcgaactcatccagacgcaggtcgaagcccgccgtgatgttaaccagcacgccgcgcgcgccagacaggtcgatatcttccagcagcggagaagagatagccatttcagcagcttcttccgcacggtcttcaccgctcgccacgccagaacccatcattgcgtagcccatctcagacattacggtgcgtacgtctgcaaagtccacgttcatcaaacccggacgagtaatcagttcagcgataccttgcacagcgcctttcagtacatcgttcgctgcgccaaacgcatccagcagggagataccgcggcccagaactttcagcagtttgtcgttcgggatagtgatcagagagtccacatgcttggacagttcagtgatcccctgctccgcgaatgccatacgcttcttgccttcaaagttgaaaggcttagtgacgacagcaacggtcaggatacccaaatcttttgccacttcagcgacgactggtgctgcacctgtaccggtaccaccacccatacccgcagcaataaagaccatgtctgcaccttccagcgccgcacgcaatgcatcgcgatcctcatcagccgcattgcggccaacttctggattagcgccagcgcccagtcctttggtgataccgctaccgatttgaatcgtctgtccaaccgctgttttacgcagcgcttgtgcatcggtatttaccgcgaagaattcaacaccttcaatgcgctcgcgcaccatgtgttcaacagcattaccgccgccgccgccgacgccgatgactttaatcaccgcgtcattggtaagttccattggttcaaacatagtttctctccgatttgtgcctgtcgcctgaggccgtaatcatcgtcggcctcataaaaattaaaactcttttcgcagccaactattgagtcgcttgatccacgagccaactgatgctgtaacacgtttttctacttcagcttcaccgttaagatgtgactctttcccatagtgaagcaatcccaccgccgtcgaataatacggctcctgagcataatccgttaaaccggtaatgttcagcggcgcgccgatacgcacttgcgtatgaaacacgcgctgagcacaggctgcaagaccttcgatctgcgctgcgccaccggttaatacaatgcctgccgccaggtgatgtttaaccccttgttggcgaagcttttcctgcaactgcaatatctcttcgttgaccaggttgagcagctcggtatagcgcggctcgatcacctctgccagtgtctgacgttgcagactccgtggcggacgaccacctacgctcggcacttccacgctctcatcttttccaacgatggaacccagcgcacaaccgtggcgaactttaatcgcttcggcgtcgcttggcggcgtgccaaaggcgtaagcgatatcactggtcacgacattgccagcataaggaattaccttagtgtggcgcaatgccccaccggtataaacggcgatatccattgtaccaccaccgatatcgacgacgcagacacccagttcacgttcatcttccgtcaataccgaataacttgatgccagtccggcaaatatcagttggtcaactttcagcccacaacgttcaaccgctttgacgatgtttttcgccatatcgttgtgacatgtgatcaggtgcacttttgcctgcatccgcacgcccgaaagtcctaccggattcttgatcccttcctgatagtcaatcgcatactcttgcgggatcacatgcagcacacgatgctcatcgcgcacacgcaccgatttcgcggtatggacgacgttttccacatcttcttgcgtcacttcttcttcagaaataggcaccataccaatttcattctggcagctgatgtgcttaccagaaagcgccagatataccgaagagatctgacaatctgccatcaattctgcctggtcaatggcgcgttgtacgcacttgaccacggattcgaggtcgttcaccccgcctttatccataccacgcgacgggcagctgcccacgccaatgatattgaccataccgtcgggcagaacttcccctactaaagcggcaaccttcgcggtaccaatctccagtcctactaccagttttctgtccgtcgccttgatcattgttgttctgcctgtgcctgattttgttgctgagtagattcctctggcggcaagggcgcccagcctactgccgctccagagtcataacgcaaatcaacgtagctaatccgtttgccatcggtttgcgcctgctgctgtaaaaccggataaagttctacaaagcgagccaaacgtttcatcgtatcgccccggccaagattgagcttaatatcgttattcagcgtcaactgccaggaacgccgcgcggtcatcgccgcttccttcagagtaaatctgtcctttgccagcatctgccccatttcgcgatagccctgcaacacttcattggcgctgccttccgggccatacagcattggaagcacctgcttgctggtgcgttctggcggcacgctgaaggtatttccttccgcgtctaccatatgttgatcattccaccgcgcaatcggcacatattcaaccagatgaatcttcaattcatcaggccactgctttctgacgctcacctgcttaatccacggcaggcgttgttctatttgcgtctggatgatgttgacatcctgggtcataaaggtacccggctcacccaatgccaggatcgactgccggatatcgtcattacgtgtgtaatggcgttcaccggtcaacaccagctttgagagcggcaggcgttgcgcatcttccatccagcccaacacgacccagccgctcaccaacactgtcgttaaaacggtcagcaggaaaaggatccccgccagacgcgttccattattgcggcgagaagaaacctcttcttcgctgtttcgcgtgttcagagcagcctgcgacatattagtccgccagttccagaattcgtactaccaactgcgagaagctcatacctgcctgacgtgccgccatcggcaccaggctgtggctggtcatacccggtgaggtattggcttccagcagataaaactgtccatcgctgtccagcataacgtcaatacgtccccatcctttgcaacctaacgtcgtccatgctttcagcactaatgcctgcaaattggcctcttgtgacgcttccagacctgcggggcagaaatactgtgtctcatcagagagatacttcgcctcataatcatagaaggttccggacggttgaatacgtattgacggtaaaatttcttcaccgagtatcgcaaccgtgaactccggcccacttagccatttttcaatcaatacttcttcatcgtgctgaaatgccaatcttaatgcatcttgtagagcattttctgctactacttttgacattcccacactggaaccttcgcggctcggcttaacgataaccggcaaacccagagcagaaatttctgctaactgcttatcgctcaggcctttttcaaactctgcgcgggttaacgctacccacggcgcgaccggtaaaccggcaccttgccatagaagtttgctgcgtagtttatccattgaaagcgcagatgccatcactccgcttccggtataaggcaagcccatcagctcgagcatcccctgcagcgtaccatcttcaccgccgcgaccgtgtagcgcgataaacactttctgaaagcccatcgacttcagttgcgtcacgtcgacttctttcgggtcgacaggatacgcgtcaataccgccttcacgcagtccggctaacaccgctgcgccagaattcagagaaacttcccgctcagcggagatcccacccaacaggaccgcgattttatcagtcatgttgttcttcctccggagtttgcggcttcagtttgatttcagctaaagaacgggcaatttttccaatattaccagccccctgaacgagaatcaggtcgttaccggttaataccggtgccagcatctcggctacccgcgccggatccggcaccagaatgggatcaattttcccacgtccacgaattgtgcgacacagcgaacggctgtccgctcccggaattggcgcttcgccagccggatacacttccagcatcaacagggtatcaacctgcgtcagcacattggcgaaatcatcatacaggtcgcgcgtacgggtaaaacggtgcggctgaaacagcattaccaggtttttatccggccagcctgcgcgcgccgctttaatggtggcgtccacttccgtcgggtggtggccgtagtcatcgaccagcattgccgtaccgcttttaccattcactggctccagcgggaattcaccgaggaaatcaaaacggcgaccagtcccctggaagctttcaagcgcccgcaaaatagcctcgtcgtcaatgccctcttccgtagcaaccgcaaccgcagctgcggcgttcagcgcgttatgacgacctggcgcattcagggtgacgcgcatcggctctttgtcctggcgcagcagcgtaaagtgcccctgcgggccaatctgctgataatcttctacacgcacgtcggcatcttcgctgaagccgtaagtcgtggtctgacgccccactcgcggtaacaattcgcggatcaccggatcatcaacacacatcaccgcacgaccgtaaaacggcaggttgtgcagaaaattaataaaagtctgttttaaattctcaaagtcgccctggtaggtatccatgtggtcggcttcgatattggtgacaatcgccaccatcggttgcagatgcaggaacgatgcatcactctcatctgcttcggcaatcaggtaccgaccatgccccaaacgcgcatgaacccccgccgcttttaccagcccgccgttaacgaaggttgggtcgagccccgcttctgcgtagatgctggaaaccatcgcggtggttgtcgttttgccgtgcgttccggcaatggcgatgccatgacgaaaacgcattaactcagccagcatttcggcacgacggatcaccggaatacgcgcttcatgagcggcgacaatttccgggttatcggcagaaatcgcgctggaaacaacgaccacgctggcatcacgtacgttttccgggcgatggttgaaataaatcgtcgcacccagattcattaactgctgcgtgaccggatttggcgctaaatcggaaccactgatctgataaccttcattggccagaacttcggcaataccgcccataccggcaccaccaatgccgacaaaatgtatgtgccgaacgcgacgcatttcgggcacgatggaacgcagttttgccaattgttgtgtattcattctttacgccattaacttcttaaattcatacgatgcaaaaggcatcgctacaattacgcccgggcaacccggctcacttcatttgccactcgctcggtggcatccggaatggatgcagcgcgggcgcgttctgccatggttaataaggtttctcgcgaccacccggccagggtgttggcgacagcatccacgctaagctgtggctgctcgataattttggctgcgcccgctttttccagcggtagcgcattccagtattgctggcggtctttatgttgaaacggcacaaacaacgccggtagtcctgccgcggcgatttcactcaccgttaacgcaccggagcggcaaacgacgacatccgcccacgcatacgccgccgccatatcatcaataaattccgtcactttatgctgcggttgccccgcttcggcatacgcctgttcaacggattgttgcgaacctttgccgctctgatgccagatagtgactgaatcacccagtttcgcagcaacctgcggcattgtctggttaagaatgcgtgcgccctgagaaccacccactaccagcacacgaaccggaccttcacgtccagccaaacgttgctgcggcaacggcagcgccaacacatcggtacgcaccgggttacccactacttccgcattagggaaagcacctggaaacgcctgcatcactttggtggcaatcttcgccagccatttattggttaagcccgcaataccgttttgttcatgaagtacaaccggaatgcctaacgaccacgcggccagaccacctggacctgacacgtagcctcccataccgagcaccacgtcaggtttgtacgctttcataatcgcccgcgcctgacgccaggcgttgaagatacgcagcggggcagctatcagtgcttttataccttttccacgcagaccagagatacgaatgaaatcaatttcgatgccatgttttggcactaagtccgcttccatacggtcggcagtccccagccagcgaacttgccaaccctgagccattagatggtgcgcaaccgccagtcccgggaatacatgtccaccggttccgcctgccatcaccattaatcgctttccttgaccactcatcgtgaacctcgtacaaacgcctgcgctttctccagacgcgtttcataatcaatacgcaacagcatcatgatggctgtcgacataatcagtaagctcgaaccaccgtaactgatcagcggcaatgtcagacctttggtcggtaacatccccgccgccgcgcctacgttaaccagcgcctggaagctaaaccagatgccaatagaacaggcgagaaaaccggaaaaacggtggtcaatttctaatgctttacggccaatcgacatcgcgcgaaaagcgacgaagaataccattaaaagtgccagcaccacaccgacataccccagttcttcgccgataatggcgaaaataaagtcagtgtgcgcttccggcagatactccagtttttgtaccgagttacctaaaccttgcccccaaagttcgccgcgaccaaacgccatcagcgattgcgttaactgatagccgctgccaaagggatcttcccacgggttccagaatgcggtaacacggcggatacggtacggttcggcgagtatcagcaacacaaccgctgaaatgcccataccgataatggcaatgaactgccacaatttcgctcccgccaggaacaacatcgccagcgtagtcacaaacaacaccaccaccgtaccaaggtctggctgtgccagcagtaacactgccaacaccagaatcacgcccatcggtttcaggaagccgcgcaggttattacgtacttcgtcgcctttacgcaccagatagttggcgatatagcaaaacagcgacagttttgtcagctccgcaggctggatacgcagcaaaccgagatcgatccaacgcgatgcccctttaaccgagctacccactaccaggacgatcatcagcaggatgatagatccgagcagcatcgtggcactgtagcgttgccagaactccatcggcagacgcagcgtaatgatcgccagaataaacgccaaaatcagatagacaccatcacgcttcgcgaagaagaacggatcgttggttaagcgttgccctatgggcattgacgccgaggtcaccatgataaagccaatcgccgcgaggccgaaggtcagccacagtaaggtgcgatcgtacatgatcaggctgtcggtatctttttcccgcgagcccatcacccagccctttagcgccgtggagatccagaccaggatactgaatcctggcaggcgcggcattttcaggcgagggagagataaacgcatcaacctaactccttcgccagacgggcaaactcattgcctcgttgttcaaagttcttgaactgatcaaggctggcacaggctggggagagcagaaccatatcgcccggctgaacacgcggagccagcaagcgcatcgcctgttccatagtttcggtttgttctgccacttccgggcgtagcgccgccagctgcgcgccgtcacgaccgaaacaatacagacgtacgttatcgccattcaggtaacgcgccagtgggctaaagtccgccgatttaccatcgccacccagcaacaaatgcagtgtgccgtctacgtgcaggccattcagcgccgcttccgtactgccgacgttggtcgctttcgaatcgttaatccaacgtacgccgttatgctccagcacaacttcaaagcgatgcggcagaccagtgaatgtggttaacgctttcaggctgctggcacgcggtaaccctgcagcatctgccagcgccagcgccgccagcgcattggtgtagttatgctgcccggaaagtttcatctctttcacattcagcactttctcgcctttaacccgcagccaggtttcgccctgctgatgattcaggtgatagtcacccatgttgacgccaaagctgacgcagcgttcatcagcaccgcgaatcggcattgttaaggcatcatcagcattaaccacgcaaactttcgcgttttcgtaaatgcgcagttttgctgcacgatactgttgtaaaccaaacggatagcgatccatatgatcttcagtcacgttcagaatggtcgctgctaccgcctgtaagctggaggtggtttccagctggaagctcgacagttccagcacgtacagttcacactcatcatccagtagcatcaacgcaggcaggccaatattgccacccacaccaacgttaacccccgccgctttcgccatttcacccactagcgtggtgaccgtgcttttgccgttagaaccggtaatcgccacaatcggtgcttgtgcttcgcgacagaacagctcgatatcgccaacgatttcgattccggcatcagcggcagcgcttaaggatggatgcgccagtgcaataccgggactggcgacaatcagatctgccgccatcagccattcatcattcagactgcccgtgtggcgttctacggcttcgggtaatttatccaggccaggcggtgtcatacgcgtatccataacgcgcggcgtcacaccgcgagcgaggaaaaagtccacgcaggaaagcccggtgaggcccaggccgataatgacgacatttttaccctgataatcagccatgattaacgtaccttcagcgttgccagaccaatcagaaccagcatcagcgaaataatccagaaacgcacaatgacgcgcggttccggccagcctttcagttcatagtggtgatgaatcggtgccatgcggaaaatacgttgtccgcgcagtttaaaggagccgacctgcaggatgacagaaagcgtttctaccacgaacacgccccccataatcaccagcaggaattcctgacgtagcagtacggcgataatgcctaacgcaccacctaacgccagcgaacctacatcgcccataaagacctgcgccggataggtgttaaaccacaggaagcccagtcctgccccgactatcgcggtacagacaataaccagttccccggcgtgtcgcagatacggtatatgcaagtagctggcaaagttcatattgccggtcgcccacgccaccagcgcaaaaccaccggcgacaaatacggtcggcataattgccaggccgtcgagaccatcggtcaggtttaccgcgttgccagtacccacaatgacgaagtaagccagcagaatgtagaacagccccagctgcggcatcacatctttaaagaatgggaccaccagctgcgttgcgggcgtgtctttgccggcaaggtacagggcgaaggcgacacccagcgcaatgaccgacatccagaaatacttccaacgagcgatcaaccctttggtgtctttacgcaccactttgcgataatcatcaacaaagccaataacaccgtaacctaccagcaccaccaacacgcaccagacgtacggattggacgggtaagcccacagcagtacggagatcacaatcgccgtcaggatcataatcccgcccatggtcggcgtaccgcgcttgctgaagtgtgattcaggaccgtcgttacgcaccacctgaccaaaggaaagtttttgcaaatgagcaatcatacgcgggcccatccacaatgagatgaacagcgcggtcagcaggctgacgatggcgcgaaacgtcagataggaaaagacgttaaagccggaataatatttgaccaaatgttcggccagccaaactaacatgtcccattctcctgtaaagcgcgtactacctcttccatggcggcactacgtgaacccttaactaaaatcgtaattacctgttgctcagcaatcagtaatttaagacgcgtaattaacgcagttttatcagcaaaatgttcgccaacgccgctggcggtgctgatagcatggctttgtttacccacgcttaacacgcggtcaataccagcagcttttgccgcctcgcccacctgtacatggcaggcttcgctttcagcgcccagttccgccatatcgcccaccaccagcacgcggtagcccggcatttcagccagtacctggactgctgcagtcattgaaccgacattggcgttgtaggagtcgtcgagcagcaactggttttctgccagttggatggggaacagacggcctggaacagctttcagatttgccagccccgctttgatagcatcaagcgttgcgcccacggacatggagagcgcagcggctgccagcgcattcgcaatattgtgacgccccggcaacggcagcagaacatcgacgctaccggttggggtttgtagggtaaattccgtaccgtgcgaggtcacatggatattggtggcggtgaaatcgctgttggcggcattgggtgagaaacgccacactttgcgtgagccaattacgctctgccagttcagccagtcgttgttgtcggcgttcataatggcgataccgttttccggcaggccgctaaagatttcacctttcgctttcgcgacacccgcaagcgagccaaaaccttccagatgcgccgctgccaggttgttgaccagcgcagcttccgggcgagtcagactcacagtccaggctatttcgccctgatggttcgcgccaagttcaataactgcgtaatcgtattccggcgttaagcgcaacagcgtcatcggtacaccgatgtcgttgttgagattgcctgccgtataaagcgtgttgccgcactggcttaaaatcgccgccgtcatctctttaacggaggttttgccggaggaccccgtcagagcaaccacgcgcgccggaacttgctggcgaacccatgcagccagttcaccaaacgccagacgcgtatccttgacgattaactgcggcaggtcgatgtccagcggacggctaaccagtagtgcgcctgcgccgccagctttcgcctggtcggcaaaatcgtgggcatcaaaacgttcgcctttcagggcaacaaacaggcagcccggcgtcagttttcgggtatcagtggttacagcatcaagggtgatatctgcaccttgcagttcaccgttgagaatgtcggtaagttggctaagggttacgctaatcatgcaatcacccccagcagacgcgccaccgtgacgcgatcggagtagtccagacgctgattgccaacaatctggtaatcttcatggcctttgcccgcgaccagtaccacatcattctctttagcctgcataacggcgcaagtcaccgcttcagcacggccttccatcactttggcatgtccggcatctaacattcccgccagaatatcgttgatgatggcacgcggttcttcggtacgcgggttatcgtccgtcaccaccgccacgtcagcaaactcttcggcaattgcgcccatcagtggacgcttacctttatcgcgatcgccaccacagccaaagacacaccacagcttgcccgcacagtgcagacgcgccgcctgtaaggctttttccagtgcatccggcgtatgcgcgtaatccaccaccaccgtcggtttgcctggcgcagtgaacacttccatacgtccgcaaaccggttgcagacgcgcggcggttttcagcagatcagccagtggatagccgagtgccaacagtgtcgccagcgcgagcagcaggttgctgacgttaaaagcgcccatcagatggctttcaatttcgccatcgccccaacttgagctaaagcgaatcgtcgcaccgctgtcgtgatagttcacttcggtcgctttcaaccagcgtccgtgacagttcggattaatatgatcttccattgataccgcaaccgcgtccggcagttttgccagccagcggcggcccacttcatcgtcggcgttaataatcgcctgaccgcaatgatgctcagaataaagcagccatttcgcggcttcgtagtgttccatatcaccatgataatcaaggtgatcgcggcttaagttggtaaagaccgacgccgcaaatttcaatgccgccacacggtgctgtaccagcccgtgggaggaaacttccattgcgcaaaacgtcgcgccctgatccaccagccccgccagctcatgctgaacatcgactgccgaaccggttgtattttctgtcgggatcactttccccagcaggccgttaccaacggtgcccattaccgcgctggtttcgccaagcagttggctccactgcgccaacagctgggtagtcgtggttttgccgttggtgcccgttacgcccacgagacgtaaattgtcagagggttcatggtaaaagcggcccgccagtgcagataaacgctcgttgagctggctgagatagatgaccggtacgccgtgcatttcacggatttcaccatcggtcgcctcatctttcgcctctgcaataatggcagccacaccttgcgctatcgcctgcgggatatatcgacgcccgtccgcctgatgacctactacagctacaaagagatcgcccgccgcagccacacggctgtcgagtgtcatctctcgcagtgctcgcgaaggtgcgtctggcacccacggagcaagaaggtcgcgcaaattacgatctgccacctgtcccctcgccttgattaatcacaaattcatttttatcgcccgttgtcagcgcatccggctcgatgttcatggtacgcaatacgccgcccatgatggcaccaaagaccggcgcggaaacggcgccgccgtagtatttacccgcctgcggatcgttgataacaacaaccagcgcgaagcgcggctgactcgcaggcgcaacgcctgcggtataagcaatatatttattgatgtagcgaccgtccggcccgacctttttcgcggtaccggttttaatggcgatacgatagcctttaatcgccgccttcacgccgccgccgcctggtagcgccacgctttccatcatatgcaccacagtgcggacaatggattccgggaagacacgttcaccgggaaccggggggtcaactttggtaatcgacagtgggcgataaatgccgtagctgccgatagttgcgtagactcgcgctaactgtaatggtgttaccattagcccgtagccgaaagagaaggtggccctctctatgtcagaccaccgttgtttttgaggatataagccactgcgttctccgaccaaccccaaattggtcgcttttcccagtccaaaacgtgagtaagtatctactaacgctgaggacggcatcgctaacgccagcttggaaacaccgacgttactcgacttctgtaataccccggtcagggttaattcgctgtagcgtgccacgtctttgatttcgtggccgttaattcgataaggaatggtattgagtaccgagttttcccgcaccacgccacgttgcaacgcggtcattaccaccatcggtttaaccgttgagcccggttcaaacacgtcggtgatggtacggttacgcatcgcctctttcggcgtgccgctcagattgttagggttgtatgacgggctgttagccatcgccagcacttcaccggtgttgacatccaccagcacggcgctaccagattcagccttgttaaaggccaccgcgttgttcagttcgcgataaaccagcgcctgcaggcgttcatcaatactcagcgccaggttgtgcgctgcctggctgtcagtagaagaaatatcttcaattacgcgaccatagcggtctttacgcacaatgcgctcacccggctgcccggtaagccatttatcgaaactcttctcaacgccctcaatcccttgactatcgacgttagtaaagccgatgaggtgagcagtcacttcgccggacggatagtaacggcgagactcttcacgcagatgaatccccggcagtttcagttttttgatgtagtccgccatgtcagggttcacctgacgcgccagataaataaagcgccctttcgggttggcgttaatgcgggctgaaagctgatccagcggaatattgagcgcgttagccagcgccttccagcggtcaccgacgctgataccgccagcgtcatgcacttctttcgggtcagcccaaatcgcttttaccggcacgctcaccgctaacgggcgaccagaacggtcagtaatcatgccgcgggaggtggaaacttgctgaacgcgaagagaacgcatgtcgccctctttcaccagcatatccggggagataacttgtaaccacgctacgcgtccgagcagaaaagccagcgccaggagaatacagccgcataacaacgcaaaacgccaactgataaagttggcatgttcttcctgacgttttggtttctgcgttttcgccgctgctttcatgcgtcgcgtttatccttatttttgcactacgatattttcttgtgacggatcaacatgctgcatttgcagcttttccgtggcgatcctttccacccggctatggtcgccgagcgcattctcttcaaggatcaggttgcgccattcaatgtctaaagcatctcgctccagcaccagttgttcgcgctgagcggtcagtaaacgggtatggtgcgccgtggttaccacagtcaccgccgtcaaaataatgcaaatgaacaggcagagtggcagcttcccaaatcgcaaaagatcgtcaccgataacaccaggcaatgcatggcgctcgtggcttcccatcgatcctttaactttgcttagagcttctgtcactctgctgatcatgcattcgtcctctctgcaatacgcagaactgaactacgggcacgagggttctcagccacctcttcttcgcccggcattaacttgcctagtgctcgcagctgacggccacccagttttttgagctgctcttcagtcatcggtaaccctgccggaacttgcggaccgcggctgttttcacgcataaaacgtttcacaatacggtcttccagcgagtggaagctgatgatcgaaagccgcccacccggggctagcacgttgagcgagctttttagcgcctgctctatctcctccagttcactgtttacccaaatgcgcaccgcctggaaggtacgggtcgcgggatgtttaaacttatctttcaccggcgttgcagcagccacgacttccgccagttctttggtgcgggtcatcggctgttcgcggttacgctcgacaatggcgcgggcaatgcgtttggcaaaacgctcttcaccataggttttcaatacccaggcgatatcggcttcttctgcggtttgtagccattcagcggctgactgcccacgggttgggtccatacgcatgtccagcggaccatcgcgcataaaggaaaagccacgttcagcatcatcaagttgcggtgaagagacgccaagatcgaggagaatgccgtcgatcttgccgataagatcgcgctcggcaacgtattcgcccagcgcggagaaaggtccgtggatgatggagaagcgcggatcatcaatagtcttcgcaacggcgatagcctgcgggtcgcgatcgatcgccagcaaacgcccctcttcgccaagctgcgagaggatcagacgtgagtgaccaccgcgaccaaaagtcccatcaatgtagatgccatcaggacggatattgaggccattaacggcttcatccagcagcaccgtagtatgtttatagttttccatcattttatagagacaagtcctgcagtcgctccgataagtctccggtagccaactgctctgcgtcgatatcttccttgacctgttgatgccaggttgtttcatcccacagctcaaacttgttgaactgtccaaccagcatcacttcttttgtcagcccggcatgttgccgcagtactggcgcgattaacaatcgacctgcgccatccatctgacattcgctggcatgacctaacagtaggcgctgcacacggcgctcaaccgggttcatgctcgacagacgcgataatttttgctcgataatttcccattcaggcagggggtaaagcagcaggcacgggtgataaatgtcaatggtgcaaaccatttgaccggcagcgttctcaagcagctgttcccgataacgggtaggcactgataagcgccctttgctgtcgagattgactaacgttgctccccggaacatgccagcctcaccccttattcccactttgccccacaatttcccactgaaaggagtttacggagctgaggaaaagcttgtcaagccagtcacaaggcataccgaggtaaaaaacccgatgtttacggctaatatcagcgttgtttattttacgtccaacgtgcgaagcaaattaacgttatgaatagctgtaagaaaaaatccctcatcgtcatcaccgttttaaaatgactcactattttccacagcaaatataaagtgtcagtttgcgacgcgagcggcattttaggacatatcttccccggttaacagtccttgttacgtctgtgtggcgcttgatgccagcgggtttgcgcaaaagcaaagaaaagtgtttgttaaatcggcaattcatcgccgcatgtaacaaaataatgcaaaaacgcgctgtcgatatcacttaattattgtgaatttcagctggtgagttaattaacgggcgggtttaaaagcatttatcaataatagtcaggaatagtcttatttactttaagcatattgatgtccagtcccgtactctacgcgccagagggaaattcacctggcgcgtatttttgttcgcggcttagctacggctgagcacgccgcggcgatagagattacgtttaatgcgcgttaaaccaggttttggcttacgcggttcgtccaggcttgccaggacaatctccagcacacgctctgcgacatcgcggtgacgttgagccactgccagcaccggacactgtaagaagtcgagcagttcgttatcgccaaaggtggcaattgccaggtcagaaggcagtttgccgtcgcgacgcagcgtgacatccatcactccttgcaacaacgcaaacgacgttgtgaacagcgcctgcggcatcggatgcgtttccagccatttttcgaataactgggcagccgcctcccgctcatagctgttggcatacaggaaatgcacttcgcgcggatcatctttccaggcagtacggaaaccttgttcacgcaggaagctgacagaaagctccggtagcgcaccaagataaagcaccgtctcggcgggaaacttacgtaactcttccgccagcatttcggcatcatcctgatcggcaccaaccacgctggtgaagtgttcacgatcgagggcgcggtccagcgcgacaatcgggaacgggtcgttagcccagcgttgataaaaaggatgctcaggaggcaacgacgtcgaaacaataatggcatcaacctgacgctgtaaaaggtgctcaatgcaccgcatttcgttgtctggctgatcttctgagcaggcaatcagcagttgataaccccgttgccgcgcctggcgttcaagatagttagcgatgcgggtatagctggtgttctccagatcggggatcacaagaccaatagaacgtgtgcgtccagcacgaagcccagctgccacggcgttcgggtggtaattgtgctcacgcaccacagccatgactttttcaacggttttgtcgctcacacggtattgcttcgctttgccgttaataacatagcttgcagtggtccgcgacactcccgccagccgagcgatttcatccagtttcacaattgccccttgcgtaaaatgtaaaaaccatagccattgtactggtatgggttaaattcattaacatctaagcgcagaaaattaactgcggcaactgcttttattccaggttcccactgatttcgcaaaaaaagcccaacgtgacatgttgggctgtaaattgcgcattgagatcattctcaacgcattattttatcgccgcgcgaaagtccgaccacaccagagcgagcaacctccacaattttcgccacatcgcgaatcgatgctaaaaatgcatcaagcttaccgctggtgcctgctaattgaacggtataaagcgagggtgtgacatcgataatttgcccacggaatatttccgtattacgtttcacttcgtcacgcccgtaaccgctggcctgaattttcaccagcatgatttcccgctcaacatgcgcgccctgccccaactcactcacgcgcaagacatcgaccagtttgtgtaattgcttttcgatctgctcaagtactttttcatcgcccacggtctggatggtcatacgcgataatgtcggatcgtcggttggcgcaacggtcaggctttcaatgttgtagccacgctgggaaaaaaggccaatcacgcgggataacgcgcctgattcattttcgagtaagactgataatatccggcgcataatcaggttctctccgttttgcttaaccacatttcatccattccgcccccgcgaatctgcatcgggtagacgtgctcgctgccatcgacggtaacatcaacaaacaccaggcgattattgcgcacctgttccagcgcctcgctaagtttgctttccagctcatgcggatgagaaatctggatcccgacatgcccataggcttccgccagacggacgaaatcgggtagcgattgcatataagattgtgaatgacggccggaatagatcatgtcctgccactgcttcaccatccccagatagcggttattgagattcaccaccagtacgggcaactcgtattgcaacgcggtagacagttcctggatgttcatctgaatactgccgtcgccagtgacgcaaaccacggtttcttctggcaacgccattttgacgcccagtgccgcaggtaaaccaaaacccatcgtgccgaggccaccggaattgatccagcgacgcggtttgtcgaatggataataaagtgcagcaaacatctggtgctgcccgacatcggacgtcacgtaagcgtctcccttcgtcaaccgccaaagagtctcgatcaccgcctgcggtttaatcttttcactgtgagtgtcatatttcaggcactgacgagcgcgccactgttcaatttgctgccaccagtcgcggatctcatccagtggttgatgggcggattcttgcgacaagagttcaagcatttgttcgaggacctggcgagcatcccccacaatcgggatatccgcagtcacggttttagaaatggaagtaggatcaatatcgatatgcagaacagtggcatttgggcagtactttgccagattgttcgtcgttcggtcatcaaatcgtaccccgacggcgaaaatcacatccgcgttatgcatcgtcatattggcttcgtaggtaccgtgcattcccagcatgcccagtgcctgacgatgcgttgccggaaacgcccccagccccatcaatgagcaaacaacgggcagattcaacgcctccaccgtttctttcaactgctgatggcagcccgccgtgattgccccaccgcctacgtagacaaccggtttttttgccgctaccagcgtttgcagagcacgcttaatttgccctttatgtccggtagtagtgggattgtaagaacgcatactgaccgactccggccagacatagggtaatttgttcgccggattaagaatatctttcggtaaatcaacgactactggtcctgggcgaccacttgccgccagccagaaagcctttttcagcacctgcggaatgtcttccgtttgcttaaccagaaaactgtgtttaaccaccggtcgcgaaatccccaccatgtcgcactcctgaaaggcatcgtaacctatcaacgaggtcgctacctgcccggaaaggacaactaatggaatggaatccatataagcggtggcgatgccagtaatcgcattggtcgcccctggacccgacgttaccagcacgacgccgacttccccggtcgcgcgcgccaggccatcggccatatgcaccgccgcctgctcatgacgaactaatacatgatcaataccacccacggtatgcaatgcatcataaatatcaaggactgcgcctccgggataaccgaatacttgtttaacgccctgatcgataagcgatcggacgaccatctcggctccagacaacatctccatggcctgcctcactgtttgacggaaaaaatgtgtaaaacacattaaccgtccgatcttgcttaagcaattggcagccagagacataaacacggggtaataagaataaacaggaggaaaggtgaaaagaaacgataaaatcctccattacagaggattaaattgataataaatcggctgaatcccacaacttacagcaatttctctatttttttaattaatcctaaaatagagagcccacacattcagaataaaattctacattcaataaaaaatgcagaataaaccagacattcatgtctgacctattctgcaatcagttagcgtttgcaaattgagactaattgctcttccatccactgatggcctttatcgcgcccggcagcttcatgccaggagagataacaggttctgctgttttgttttaacggcagcggtaatacctgtaattctaaggattcagcgaactcttcagccagccaacgcggcgcaatagcgaccaaatgcgtttgcgacaccacgctaagtacgctcatcattgccatgccctgatacgcgatactggcttgcttatctaccgtgtcataccaaggttgactaaatgacgcgaaacgatcgagcgaaaccgccgcatgttgttcgttataaacatcatgtttcagtaacgggcccttaattgttggatgatttttgctggctaccagcaccatttcatctttaaataatggtacgctggtaaattcaggacgatggaagtcttcataactaatcacaaactccgtttcctgataacgcagctgatgttcagtgttctgatttaatgaagacttgaacataacatgtatatttggcgcaatctgctcaatgtgattataaatctgcgaggtcagaatgctgtctaacgggctgcaaacacaaagatgaaatacacgttcaccactcgcgggttcaaaacctgaaccaggcaattcattttgtactagttgcaatgcctggcgaactgaaccaaaaagttgaaatgcgcgagcagtcggttgaataccacggccataacgaacaaaaagctcgtcattaaacatcaccttcaggcgtgcaacagcgttactgaccgcaggttgcgacatacccagaacatgagcggcacgggtaatgttttgctcctgcatcacggcatcgaaaacggttaataagttgagatcgaccatgcgtagctgtggcttgcttaactccgccgtctctgaatgatctgtttgtacctctggcatacttaactccactgtcacacttaactccctttcccttattggaatgcagagaaataatcctgaagaatatgatttatcatgcatataaaataagaaaaaggaaaatgagtaaaattaggaaaacataaagatacgggttctgataaaaacagaatccattgccgtggaatgagtcatttaccacagcataataatccataatgattttgttgcgagaacaatctaatcataactaccgcgaatactcaatcatctacaaaatggattaaatgtgcttatttaataattaatttatatatttaatgcattaattcttaacattaattgatcaataatattcaccaaatcaatatcaaaaaaaaatcgcaaaacatataattcaatacaaatcatcaggataggttttgcaacgcgtgcattttgtcccctttttcctcgttgattagatgcaaaaatttatgctgaaatatgtcaaccgatgaaaagcgtcggtagttaagcagaaattaatatcgcttactttaaccaccgcagcacaattagctaattttacggatgcagaactcacgctggcgggacgtttttattgcgtcagggttgacatccgtttttgtatccagtaactctaaaagcatatcgcattcatctggagctgatttaatgactcacatcgttcgctttatcggtctactactactaaacgcatcttctttgcgcggtagacgagtgagcggcatccagcattaagccagcacgcagtcaaacaaaaaacccgcgccattgcgcgggtttttttatgcccgaagcgaggcgctctaaaagagacaaggacccaaaccatgagccagcaagtcattattttcgataccacattgcgcgacggtgaacaggcgttacaggcaagcttgagtgtgaaagaaaaactgcaaattgcgctggcccttgagcgtatgggtgttgacgtgatggaagtcggtttccccgtctcttcgccgggtgattttgaatcagtgcaaaccatcgcccgccaggttaaaaacagccgcgtatgcgcgttagctcgctgcgtggagaaagatatcgacgtggcggccgaatccctgaaagtcgccgaagccttccgtattcatacctttattgccacttcgccaatgcacatcgccaccaagctgcgcagcacgctggatgaagtgatcgaacgcgctatctatatggtgaaacgcgcccgtaattacaccgatgatgttgaattttcttgcgaagatgccgggcgtacacccattgccgatctggcgcgagtggtcgaagcggcgattaatgccggtgccaccaccatcaacattccggacaccgtgggctacaccatgccgtttgagttcgccggaatcatcagcggcctgtatgaacgcgtacctaacatcgacaaagccattatttccgtacatacccacgacgatttaggcctggcggtcggcaactcactggcggcggtacatgccggtgcacgccaggtggaaggtgcaatgaacgggatcggcgagcgtgccggaaactgttccctggaagaagtcatcatggcgatcaaagttcgtaaggatattctcaacgtccacaccgccattaatcaccaggagatatggcgcaccagccagttagttagccagatttgtaatatgccgatcccggcaaacaaagccattgttggcagcggcgcattcgcacactcctccggtatacaccaggatggcgtgctgaaaaaccgcgaaaactacgaaatcatgacaccagaatctattggtctgaaccaaatccagctgaatctgacctctcgttcggggcgtgcggcggtgaaacatcgcatggatgagatggggtataaagaaagtgaatataatttagacaatttgtacgatgctttcctgaagctggcggacaaaaaaggtcaggtgtttgattacgatctggaggcgctggccttcatcggtaagcagcaagaagagccggagcatttccgtctggattacttcagcgtgcagtctggctctaacgatatcgccaccgccgccgtcaaactggcctgtggcgaagaagtcaaagcagaagccgccaacggtaacggtccggtcgatgccgtctatcaggcaattaaccgcatcactgaatataacgtcgaactggtgaaatacagcctgaccgccaaaggccacggtaaagatgcgctgggtcaggtggatatcgtcgctaactacaacggtcgccgcttccacggcgtcggcctggctaccgatattgtcgagtcatctgccaaagccatggtgcacgttctgaacaatatctggcgtgccgcagaagtcgaaaaagagttgcaacgcaaagctcaacacaacgaaaacaacaaggaaaccgtgtgatgtcgaagaattaccatattgccgtattgccgggggacggtattggtccggaagtgatgacccaggcgctgaaagtgctggatgccgtgcgcaaccgctttgcgatgcgcatcaccaccagccattacgatgtaggcggcgcagccattgataaccacgggcaaccactgccgcctgcgacggttgaaggttgtgagcaagccgatgccgtgctgtttggctcggtaggcggcccgaagtgggaacatttaccaccagaccagcaaccagaacgcggcgcgctgctgcctctgcgtaagcacttcaaattattcagcaacctgcgcccggcaaaactgtatcaggggctggaagcattctgtccgctgcgtgcagacattgccgcaaacggcttcgacatcctgtgtgtgcgcgaactgaccggcggcatctatttcggtcagccaaaaggccacgaaggtagcggacaatatgaaaaagcctttgataccgaggtgtatcaccgttttgagatcgaacgtatcgcccgcatcgcgtttgaatctgctcgcaagcgtcgccacaaagtgacgtcgatcgataaagccaacgtgctgcaatcctctattttatggcgggagatcgttaacgagatcgccacggaatacccggatgtcgaactggcgcatatgtacatcgacaacgccaccatgcagctgattaaagatccatcacagtttgacgttctgctgtgctccaacctgtttggcgacattctgtctgacgagtgcgcaatgatcactggctcgatggggatgttgccttccgccagcctgaacgagcaaggttttggactgtatgaaccggcgggcggctcggcaccagatatcgcaggcaaaaacatcgccaacccgattgcacaaatcctttcgctggcactgctgctgcgttacagcctggatgccgatgatgcggcttgcgccattgaacgcgccattaaccgcgcattagaagaaggcattcgcaccggggatttagcccgtggcgctgccgccgttagtaccgatgaaatgggcgatatcattgcccgctatgtagcagaaggggtgtaatcatggctaagacgttatacgaaaaattgttcgacgctcacgttgtgtacgaagccgaaaacgaaaccccactgttatatatcgaccgccacctggtgcatgaagtgacctcaccgcaggcgttcgatggtctgcgcgcccacggtcgcccggtacgtcagccgggcaaaaccttcgctaccatggatcacaacgtctctacccagaccaaagacattaatgcctgcggtgaaatggcgcgtatccagatgcaggaactgatcaaaaactgcaaagaatttggcgtcgaactgtatgacctgaatcacccgtatcaggggatcgtccacgtaatggggccggaacagggcgtcaccttgccggggatgaccattgtctgcggcgactcgcataccgccacccacggcgcgtttggcgcactggcctttggtatcggcacttccgaagttgaacacgtactggcaacgcaaaccctgaaacagggccgcgcaaaaaccatgaaaattgaagtccagggcaaagccgcgccgggcattaccgcaaaagatatcgtgctggcaattatcggtaaaaccggtagcgcaggcggcaccgggcatgtggtggagttttgcggcgaagcaatccgtgatttaagcatggaaggtcgtatgaccctgtgcaatatggcaatcgaaatgggcgcaaaagccggtctggttgcaccggacgaaaccacctttaactatgtcaaaggccgtctgcatgcgccgaaaggcaaagatttcgacgacgccgttgcctactggaaaaccctgcaaaccgacgaaggcgcaactttcgataccgttgtcactctgcaagcagaagaaatttcaccgcaggtcacctggggcaccaatcccggccaggtgatttccgtgaacgacaatattcccgatccggcttcgtttgccgatccggttgaacgcgcgtcggcagaaaaagcgctggcctatatggggctgaaaccgggtattccgctgaccgaagtggctatcgacaaagtgtttatcggttcctgtaccaactcgcgcattgaagatttacgcgcggcagcggagatcgccaaagggcgaaaagtcgcgccaggcgtgcaggcactggtggttcccggctctggcccggtaaaagcccaggcggaagcggaaggtctggataaaatctttattgaagccggttttgaatggcgcttgcctggctgctcaatgtgtctggcgatgaacaacgaccgtctgaatccgggcgaacgttgtgcctccaccagcaaccgtaactttgaaggccgccaggggcgcggcgggcgcacgcatctggtcagcccggcaatggctgccgctgctgctgtgaccggacatttcgccgacattcgcaacattaaataaggagcacaccatggcagagaaatttatcaaacacacaggcctggtggttccgctggatgccgccaatgtcgataccgatgcaatcatcccgaaacagtttttgcagaaagtgacccgtacgggttttggcgcgcatctgtttaacgactggcgttttctggatgaaaaaggccaacagccaaacccggacttcgtgctgaacttcccgcagtatcagggcgcttccattttgctggcacgagaaaacttcggctgtggctcttcgcgtgagcacgcgccctgggcattgaccgactacggttttaaagtggtgattgcgccgagttttgctgacatcttctacggcaatagctttaacaaccagctgctgccggtgaaattaagcgatgcagaagtggacgaactgtttgcgctggtgaaagctaatccggggatccatttcgacgtggatctggaagcgcaagaggtgaaagcgggagagaaaacctatcgctttaccatcgatgccttccgccgccactgcatgatgaacggtctggacagtattgggcttaccttgcagcacgacgacgccattgccgcttatgaagcaaaacaacctgcgtttatgaattaatccccttgcccggtcaaatgaccgggctttccgctatcgtccacgtcatcaaacgtctttaacctttgcggttaaaaataatgcgacaacagaaataaccgcaattacccagtagacagcaaagtgcccccaactttgtgcaattgctccctgaataacgccagccagaattaccccggtagaaatactgttagtaaataaggtggtagctgcccccgctcttccaggcattaaatcctgaaaccatagcatcccaatacccgcaacaatgccgataaatacagcgttaaaaagttgcagcgtcatcaacgccatacggctattaaagaaaatcaatccggtgtaaaacagtactcctgccgccactgctatgaccatcattcgccgcttaccataacgtttgacatagtagccagccagaatcattgctggtatttccagtccagctgccgtccccatcaggaaacccgccagtttgtctggcaatcctaactcgctactgatccacaacggcatatcaataatgtacatggtgttgcaggtccacattaacgtcgaggcgacaaataacatccgtacgttactatcctgccagccaccttgcattgataaagcattttccgacggcagttctacccgcgccacagacggaagcataaatgcaatcaataccagactgagtgtgaatatcccggcggcaatcgaaaacatcaccgtaaagccgtaattcaacgccagcataaaggccaacggtggaccgataacccatgccagagaaagctgcgcacgcatcaccgagctaaacatcaccacttctcgcgccgagttatccgcatattcccgcgccagagcaaataactgtggcattgccgtattggccagagatgccagaagcacaccacaggtgataagcgtcagataatgacgattaaatgcaaacaatagcgcattgccgatagccatcaaacagcaaaatataatcagttttcgccgatcgccctgactgtcagaacgttttgccaaccagaggcttacgccgatcccagcaatagcattcaccgtataaaagaggccgatccagaaaggttgcgcgccaacctcacgactcagaaataagctcaatgtaggagcctgtagcgccccggccacccccatcataaaagcgaccagcataaatgccgcgtaaacaccgttcatacggcgagccatcgtcattatccagatcatacgttccctttttagcgcggcgagaataaaaaaaaccagcaggtataatctgctggcgggtgattttacaccaatactcagtcacacatgatgcaggcaagtcaactttcagaattgcggtcatcccactgcatcagtccttcaagcatggttaatcgttgtgggacgcttaaccaacgcaaccagcacaacttcgctgtcgcggtaaaatagtgctgataaaactgacgcatggggcacccccttgcttcatcgttaggaattattgacttaatatagggaaaataaaattgctgtcttttgcacaggagttccccttttatgccatctgctcgtctgcaacaacagttcatccgcctgtggcaatgctgcgagggtaaatcgcaggacacaacgctcaacgaactggcagcgttattgagctgctcgcgtcgtcatatgcgcaccctgctcaacaccatgcaggatcgcggctggctgacgtgggaagcggaagtcgggcgcggtaaacgctcgcgtctgacattcctctataccgggctggcgcttcagcaacagcgggcggaagacctgctggagcaggatcgtatcgatcaactggtgcagttggttggcgacaaagcgactgtgcggcaaatgctggtttctcatctgggccgcagcttccgccaggggcggcacatcctgcgcgtgctctactatcgtccgttgcgtaatctgctacctggcagcgcattgcgccgttccgaaacccatatcgcccggcaaatcttcagttcgctaacgcgcataaatgaggaaaatggggaactggaagcagacatcgcccaccactggcagcaaatttcaccgcttcactggcgtttctttttgcgtccaggagtccattttcaccatggtcgtgaactggaaatggacgatgtgatcgcctctttaaaacgaatcaatacgctgccgctctattcgcatattgctgacattgtgtcgccgacgccctggacgctggatatccatctcacgcaaccggaccgctggttaccgttactgctggggcaagttccggcgatgatcctgccgcgcgaatgggaaaccctcagtaactttgccagccatcccatcggcaccggtccgtatgcggtgattcgcaacagcaccaatcaactgaaaattcaggcattcgatgacttcttcggttaccgggcattaatcgacgaagttaacgtctgggttctgccggaaattgccgacgagccagccggagggctgatgctaaaaggtccacagggcgaggaaaaagagattgaaagccgcctggaggaaggttgctactatttactgttcgacagccgcacccatcgcggggcgaatcagcaagtcagggactgggtaagctatgtgctttctccaactaatctggtctatttcgctgaggaacagtaccagcaactgtggttcccggcttatggactgctcccccgttggcaccatgcccgcaccataaagagcgaaaaaccggctggcctggaaagcctcaccctaaccttttatcaggatcacagtgagcatcgggtgattgccgggatcatgcagcagattctggcaagtcaccaggtcacgctgaaaatcaaagagatcgactacgatcagtggcatacaggagagatcgaaagtgatatctggctaaacagcgccaactttaccctgccgctggacttctctgttttcgcacatttatgcgaagtgccactgctacaacattgcattcccattgactggcaagccgacgctgctcgctggcgcaatggcgagatgaatctggcgaactggtgccagcaactggtcgccagcaaagcgatggtgccattattgcaccactggctgatcattcaggggcaacgcagtatgcgcggcctgcgcatgaataccctcggctggttcgattttaaatcagcgtggtttgcgccaccggatccatgattgctggttgataacaaaatcactacactaacgccgttctcaacggggtgccacgcgtacgcgtgcgctgagaaaatacccgtcgaacctgatccggataacgccggcgaagggatttgaggctccttctcaagtcctttgccactcttttttgaggtgcaaagtgttaaaaaaatgtctgcccctgctgttgctgtgcacagcgcccgttttcgctaaacccgttctgactgtttatacctacgattccttcgccgccgactgggggcctggtccggtggttaaaaaagcctttgaagccgactgtaattgcgaactgaaactggtggcgctggaagatggcgtttcgcttctcaaccgtctacggatggaaggcaaaaacagtaaagccgatgtggtgctggggctggataacaacctgttagacgccgccagtaaaaccggactgtttgccaaaagcggtgtggcagcggatgccgttaacgttcccggcggctggaataatgacactttcgtaccgtttgattatggctacttcgccttcgtttatgacaagaacaaactgaaaaacccgccacaaagcctgaaagaactggttgagagcgatcaaaactggcgggtgatttatcaggatccgcgcaccagtacaccggggctgggtctgttgctatggatgcaaaaagtctatggcgatgacgccccacaagcctggcagaaactggcgaagaaaacggtcacggtcaccaaaggctggagcgaagcctacggcctgtttttaaaaggtgaaagcgatctggtactgagttacaccacctctccggcttatcacattctcgaagagaagaaagataactacgccgccgcgaacttcagcgaaggtcactatctgcaagtggaagtcgccgcccgcagcgctgccagcaagcagccggagctggcgcaaaaattcctccagtttatggtttctccggctttccagaatgcgatcccaaccggcaactggatgtatccggtggcaaacgtcacgctgcctgccggttttgaaaaattgaccaaacccgcaaccacgttggagttcacgccagccgaagtggcggcacaacgtcaggcatggattagcgaatggcaacgcgccgtcagccgttaattcccggctggttaattccaggtgtaagcgccaccacgctggtggtagcggttgcgctggcggcgtttctcgccctgtggtggaacgcgccgcaggatgactgggtggcagtctggcaggacagctatctgtggcatgtggtgcgcttctccttctggcaggcgtttctctcggcactgctctctgtcatacccgcgatattcctcgcccgcgcgctctatcgcaggcgctttccgggtcggctggcgctgttgcgtctgtgtgcaatgaccttgatcctcccggtgttggtcgctgttttcggcattcttagcgtctatggtcgccagggctggctggcaacactctgccaatcgctcggtctggagtggaccttttcgccctacggcctgcaaggtattttgctggcccatgtgttttttaatctgccgatggcgagccgcttattactccaggcactggaaaacatccccggcgaacagcgtcaacttgccgcccagcttgggatgcgtagctggcattttttccgcttcgtcgaatggccgtggttacggcgacaaatcccgccggttgctgcgcttatctttatgctctgtttcgccagcttcgccaccgtgctatcgctggggggcggtccgcaggcgaccactatcgagctggcaatctatcaggcgctgagttacgactacgatcctgcccgcgcggcaatgctggcgctgctccagatggtgtgctgcctcgggctggtgctgttgagtcagcgattgagtaaggccattgcgcccggcaccacgctgctgcaaggctggcacgacccggacgatcgtctgcatagccgcatttgcgacacggtgttaattgtgctggcgctgctgctgttgctgccaccgttactggcggtgatcgtcgatggggtaaatcgccagttgccggaagtgctggcacaaccggtgctgtggcaggcgctgtggacctcgttgcgtattgcgctggcggcaggtgtattgtgcgtagtgctgaccatgatgctgctatggagcagtcgcgaactgcgggcgcggcagaaaatgctggcgggtcaggtgctggagatgagcggcatgttgatcctcgccatgccggggattgtgctggctaccggcttctttttactgctcaacaacactatcggcctgccacaatctgctgacggcattgtgattttcaccaatgcgttaatggcgatcccttatgcgctgaaagtgctggaaaacccgatgcgcgatatcaccgcccgctacagcatgttatgtcagtcgctggggattgaaggctggtcacgcttaaaagtggtggagctgcgcgccctgaaacgtccactggcgcaggcgctggcctttgcatgcgtgctgtcgattggtgattttggcgtggtggcgttgttcggtaacgatgatttccgcaccctgccgttttatctctaccagcaaattggctcctatcgcagccaggacggtgcggtcaccgcgttaattctgctgctgctctgttttctgctgtttaccgtgattgaaaaactaccggggcgaaatgttaaaactgactgatatcacctggctttaccaccatttgccgatgcgttttagcttaacggtggaacgcggcgagcaggtggcgatcctcgggccaagcggcgcgggtaaaagtaccctgctgaatttgatcgccggttttctgacgccagccagcggttcgctgactatcgatggcgtagatcacacaactatgccgccgtcacgccgtccggtgtcgatgctgtttcaggagaacaacctgttcagccacctgacggtcgcacagaacatcgggctggggctaaatccgggattgaaactgaacgcggtacagcaggggaaaatgcacgctatcgcccgccagatggggattgataatttaatggcgcggttaccgggcgagctttccggcggtcagcgacagcgagtggcgttagcgcgttgtctggtacgcgaacagccgattttattgctcgatgaaccgttctctgcgctcgatccggcgttacgtcaggagatgttgacgctggtgagcacgagctgccagcagcaaaaaatgacgctattgatggtgtcgcacagcgtggaagatgcggcgcggatcgccacgcgctcggtagtagtcgccgacgggcgcatcgcctggcagggtatgaccaatgagttgttgagcggtaaggcgagtgcttcggcactattggggattacgggttagtatgcactgtcggatgcggcgtgaacgccttatccgacctacgggtagtgcgttttgtaggcctgataagacgcggcaagcgtcgcatcaggcaacccgcacaagactatctcctaaaccccaaccactttacgcaaaatatcgatatacaccggcatcaacgggtggcgaattaacaccaccagcgccaccacgccgatggcagaaatcaacggcgtcagccacaacaaacgaccgcgggacaaataatgactcaaacggtcagtcgctttaccgctgcgccataaccgccagcacagccagccaccaacccacaaaaacaccgctgttgccagcagcaaccatttaaactcaccgctctgcattccggcaggaatatcgatcgccgcgcccgccagaatccctggcaggaagtaaaacggcggccacagcaggcagccgataatattcggcgtaataaatttagccaccggcagatccagcattcccgccaccattggcaccagcggacgcgtcgggccaacaaaacgaccgaccagaatggtgaacatgctgtgttgatgcaacgcatgttcagttttatcaagtagtgctttgtttttcttcagaaatgaccagcgatgcaacggctttttaaaacgccaacccagccagaaagaaatccagtcgcccatcaagcagccaataatccctgccagccaggcgtgccagaaacttaactcgccgctgccaatcagcgctcccagccccgccatcagcaccgtaccgggtagaatcaaaccgaccagcgccagcgactccagaaaggccaccaacaccaccgccatcaatgaatacacggtggattgggtaataaagtgttccagcaatgcttgcataatgtgcctgtcaaatggacgaagcagggattctgcaaaccctatgctactccgtcaagccgtcaattgtctgattcgttaccaattatgacaacttgacggctacatcattcactttttcttcacaaccggcacgaaactcgctcgggctggccccggtgcattttttaaatactcgcgagaaatagagttgatcgtcaaaaccaacattgcgaccgacggtggcgataggcatccgggtagtgctcaaaagcagcttcgcctgactaatgcgttggtcctcgcgccagcttaagacgctaatccctaactgctggcggaaaagatgtgacagacgcgacggcgacaagcaaacatgctgtgcgacgctggcgatatcaaaattgctgtctgccaggtgatcgctgatgtactgacaagcctcgcgtacccgattatccatcggtggatggagcgactcgttaatcgcttccatgcgccgcagtaacaattgctcaagcagatttatcgccagcagctccgaatagcgcccttccccttgcccggcgttaatgatttgcccaaacaggtcgctgaaatgcggctggtgcgcttcatccgggcgaaagaaacccgtattggcaaatattgacggccagttaagccattcatgccagtaggcgcgcggacgaaagtaaacccactggtgataccattcgcgagcctccggatgacgaccgtagtgatgaatctctcctggcgggaacagcaaaatatcacccggtcggcagacaaattctcgtccctgatttttcaccaccccctgaccgcgaatggtgagattgagaatataacctttcattcccagcggtcggtcgataaaaaaatcgagataaccgttggcctcaatcggcgttaaacccgccaccagatgggcgttaaacgagtatcccggcagcaggggatcattttgcgcttcagccatacttttcatactcccaccattcagagaagaaaccaattgtccatattgcatcagacattgccgtcactgcgtcttttactggctcttctcgctaacccaaccggtaaccccgcttattaaaagcattctgtaacaaagcgggaccaaagccatgacaaaaacgcgtaacaaaagtgtctataatcacggcagaaaagtccacattgattatttgcacggcgtcacactttgctatgccatagcatttttatccataagattagcggatcctacctgacgctttttatcgcaactctctactgtttctccatacccgtttttttggatggagtgaaacgatggcgattgcaattggcctcgattttggcagtgattctgtgcgagctttggcggtggactgcgctaccggtgaagagatcgccaccagcgtagagtggtatccccgttggcagaaagggcaattttgtgatgccccgaataaccagttccgtcatcatccgcgtgactacattgagtcaatggaagcggcactgaaaaccgtgcttgcagagcttagcgtcgaacagcgcgcagctgtggtcgggattggcgttgacagtaccggctcgacgcccgcaccgattgatgccgacggaaacgtgctggcgctgcgcccggagtttgccgaaaacccgaacgcgatgttcgtattgtggaaagaccacactgcggttgaagaagcggaagagattacccgtttgtgccacgcgccgggcaacgttgactactcccgctacattggtggtatttattccagcgaatggttctgggcaaaaatcctgcatgtgactcgccaggacagcgccgtggcgcaatctgccgcatcgtggattgagctgtgcgactgggtgccagctctgctttccggtaccacccgcccgcaggatattcgtcgcggacgttgcagcgccgggcataaatctctgtggcacgaaagctggggcggcctgccgccagccagtttctttgatgagctggacccgatcctcaatcgccatttgccttccccgctgttcactgacacttggactgccgatattccggtgggcaccttatgcccggaatgggcgcagcgtctcggcctgcctgaaagcgtggtgatttccggcggcgcgtttgactgccatatgggcgcagttggcgcaggcgcacagcctaacgcactggtaaaagttatcggtacttccacctgcgacattctgattgccgacaaacagagcgttggcgagcgggcagttaaaggtatttgcggtcaggttgatggcagcgtggtgcctggatttatcggtctggaagcaggccaatcggcgtttggtgatatctacgcctggtttggtcgcgtactcggctggccgctggaacagcttgccgcccagcatccggaactgaaaacgcaaatcaacgccagccagaaacaactgcttccggcgctgaccgaagcatgggccaaaaatccgtctctggatcacctgccggtggtgctcgactggtttaacggccgccgcacaccgaacgctaaccaacgcctgaaaggggtgattaccgatcttaacctcgctaccgacgctccgctgctgttcggcggtttgattgctgccaccgcctttggcgcacgcgcaatcatggagtgctttaccgatcaggggatcgccgttaataacgtgatggcactgggcggcatcgcgcggaaaaaccaggtcattatgcaggcctgctgcgacgtgctgaatcgcccgctgcaaattgttgcctctgaccagtgctgtgcgctcggtgcggcgatttttgctgccgtcgccgcgaaagtgcacgcagacatcccatcagctcagcaaaaaatggccagtgcggtagagaaaaccctgcaaccgtgcagcgagcaggcacaacgctttgaccagctttatcgccgctatcagcaatgggcgatgagcgccgaacaacactatcttccaacttccgccccggcacaggctgcccaggccgttgcgactctataaggacacgataatgacgatttttgataattatgaagtgtggtttgtcattggcagccagcatctgtatggcccggaaaccctgcgtcaggtcacccaacatgccgagcacgtcgttaatgcgctgaatacggaagcgaaactgccctgcaaactggtgttgaaaccgctgggcaccacgccggatgaaatcaccgctatttgccgcgacgcgaattacgacgatcgttgcgctggtctggtggtgtggctgcacaccttctccccggccaaaatgtggatcaacggcctgaccatgctcaacaaaccgttgctgcaattccacacccagttcaacgcggcgctgccgtgggacagtatcgatatggactttatgaacctgaaccagactgcacatggcggtcgcgagttcggcttcattggcgcgcgtatgcgtcagcaacatgccgtggttaccggtcactggcaggataaacaagcccatgagcgtatcggctcctggatgcgtcaggcggtctctaaacaggatacccgtcatctgaaagtctgccgatttggcgataacatgcgtgaagtggcggtcaccgatggcgataaagttgccgcacagatcaagttcggtttctccgtcaatacctgggcggttggcgatctggtgcaggtggtgaactccatcagcgacggcgatgttaacgcgctggtcgatgagtacgaaagctgctacaccatgacgcctgccacacaaatccacggcaaaaaacgacagaacgtgctggaagcggcgcgtattgagctggggatgaagcgtttcctagaacaaggtggcttccacgcgttcaccaccacctttgaagatttgcacggtctgaaacagcttcctggtctggccgtacagcgtctgatgcagcagggttacggctttgcgggcgaaggcgactggaaaactgccgccctgcttcgcatcatgaaggtgatgtcaaccggtctgcagggcggcacctcctttatggaggactacacctatcacttcgagaaaggtaatgacctggtgctcggctcccatatgctggaagtctgcccgtcgatcgccgcagaagagaaaccgatcctcgacgttcagcatctcggtattggtggtaaggacgatcctgcccgcctgatcttcaatacccaaaccggcccagcgattgtcgccagcttgattgatctcggcgatcgttaccgtctactggttaactgcatcgacacggtgaaaacaccgcactccctgccgaaactgccggtggcgaatgcgctgtggaaagcgcaaccggatctgccaactgcttccgaagcgtggatcctcgctggtggcgcgcaccataccgtcttcagccatgcactgaacctcaacgatatgcgccaattcgccgagatgcacgacattgaaatcacggtgattgataacgacacacgcctgccagcgtttaaagacgcgctgcgctggaacgaagtgtattacgggtttcgtcgctaagtagccgcatccggtatgtaacgcctgatgcgacgctgacgcgtcttatctggcctacacgctgcgattttgtaggccggataagcaaagcgcatccggcattcaacgcctgatgcgacgctggcgcgtcttatcaggcctacacgctgcgattttgtaggccggataagcaaagcgcatccggcacgaaggagtcaacatgttagaagatctcaaacgccaggtattagaagccaacctggcgctgccaaaacacaacctggtcacgctcacatggggcaacgtcagcgccgttgatcgcgagcgcggcgtctttgtgatcaaaccttccggcgtcgattacagcgtcatgaccgctgacgatatggtcgtggttagcatcgaaaccggtgaagtggttgaaggtacgaaaaagccctcctccgacacgccaactcaccggctgctctatcaggcattcccctccattggcggcattgtgcatacgcactcgcgccacgccaccatctgggcgcaggcgggtcagtcgattccagcaaccggcaccacccacgccgactatttctacggcaccattccctgcacccgcaaaatgaccgacgcagaaatcaacggcgaatatgagtgggaaaccggtaacgtcatcgtagaaacctttgaaaaacagggtatcgatgcagcgcaaatgcccggcgttctggtccattcccacggcccgtttgcatggggcaaaaatgccgaagatgcggtgcataacgccatcgtgctggaagaggtcgcttatatggggatattctgccgtcagttagcgccgcagttaccggatatgcagcaaacgctgctggataaacactatctgcgtaagcatggcgcgaaggcatattacgggcagtaatgactgtataaaaccacagccaatcaaacgaaaccaggctatactcaagcctggttttttgatggattttcagcgtggcgcaggcaggttttatcttaacccgacactggcgggacaccccgcaagggacagaagtctccttctggctggcgacggacaacgggccgttgcaggttacgcttgcaccgcaagagtccgtggcgtttattcccgccgatcaggttccccgcgctcagcatattttgcagggtgaacaaggctttcgcctgacaccgctggcgttaaaggattttcaccgccagccggtgtatggcctttactgtcgcgcccatcgccaattgatgaattacgaaaagcgcctgcgtgaaggtggcgttaccgtctacgaggccgatgtgcgtccgccagaacgctatctgatggagcggtttatcacctcaccggtgtgggtcgagggtgatatgcacaatggcactatcgttaatgcccgtctgaaaccgcatcccgactatcgtccgccgctcaagtgggtttctatagatattgaaaccacccgccacggtgagctgtactgcatcggcctggaaggctgcgggcagcgcatcgtttatatgctggggccggagaatggcgacgcctcctcgcttgatttcgaactggaatacgtcgccagccgcccgcagttgctggaaaaactcaacgcctggtttgccaactacgatcctgatgtgatcatcggttggaacgtggtgcagttcgatctgcgaatgctgcaaaaacatgccgagcgttaccgtcttccgctgcgtcttgggcgcgataatagcgagctggagtggcgcgagcacggctttaaaaacggcgtcttttttgcccaggctaaaggtcggctaattatcgacggtatcgaggcgctgaaatccgcgttctggaatttctcttcattctcgctggaaactgtcgctcaggagctattaggcgaaggaaaatctatcgataacccgtgggatcgaatggacgaaattgaccgccgtttcgccgaagataaacctgcgctggcaacttataacctgaaagattgcgagctggtgacgcagatcttccacaaaactgaaatcatgccatttttactcgaacgggcaacggtgaacggcctgccggtggaccgacacggcggttcggtggcggcatttggtcatctctattttccgcgaatgcatcgcgctggttatgtcgcgcctaatctcggcgaagtgccgccgcacgccagccctggcggctacgtgatggattcacggccagggctttatgattcagtgctggtgctggactataaaagcctgtacccgtcgatcatccgcacctttctgattgatcccgtcgggctggtggaaggcatggcgcagcctgatccagagcacagtaccgaaggttttctcgatgcctggttctcgcgagaaaaacattgcctgccggagattgtgactaacatctggcacgggcgcgatgaagccaaacgccagggtaacaaaccgctgtcgcaggcgctgaaaatcatcatgaatgccttttatggcgtgctcggcaccaccgcctgccgcttcttcgatccgcggctggcatcgtcgatcaccatgcgtggtcatcagatcatgcggcaaaccaaagcgttgattgaagcacagggctacgacgttatctacggcgataccgactcaacgtttgtctggctgaaaggcgcacattcggaagaagaagcggcgaaaatcggtcgtgcactggtgcagcacgttaacgcctggtgggcggaaacgctacaaaaacaacggctgaccagcgcattagaactggagtatgaaacccatttctgccgttttctgatgccaaccattcgcggagccgataccggcagtaaaaagcgttatgccggactgattcaggagggcgacaagcagcggatggtgtttaaagggctggaaaccgtgcgcaccgactggacgccgctggcccagcagtttcagcaggagctatacctgcgcatcttccgcaacgagccatatcaggaatatgtacgcgaaaccatcgacaaactgatggcgggtgaactggatgcgcgactggtttaccgtaaacgccttcgccgtccgctgagcgagtatcagcgtaatgtgccgcctcatgtacgcgccgctcgccttgccgatgaagaaaaccaaaagcgtggtcgccccttgcaatatcagaatcgcggcaccattaagtacgtatggaccaccaacggcccggagccgctggactaccaacgttcaccactggattacgaacactatctgacccgccagctacaacccgtggcggagggaatactcccttttattgaggataattttgctacacttatgaccgggcaacttgggctattttgagcaaaaaaaagagttcgccagataccattttgatgcgtgacgaatgctttgccatccagtaccatagcgccctttccattcctggacctgaataacaccactacctcataagcacggtagcgggtggttattgcctgcaattaaagatatagagccgaacacatatgccttttacacttggtcaacgctggatcagcgatacagaaagcgaattgggacttggaaccgttgtcgcggtggatgcgcgaactgtcactttacttttcccatctactggtgaaaaccgtctgtacgcacgcagtgattcccccgtgacccgcgtgatgttcaaccctggtgataccattaccagccatgacggctggcagatgcaagtcgaagaagtaaaagaagaaaatggcttgctgacctatatcggtactcgcctggatactgaagagtccggcgtagccctgcgtgaagttttccttgatagcaaactggtgttcagcaaaccgcaggaccgtctgtttgccgggcagattgaccgtatggaccgctttgcgctgcgttatcgcgcgcgtaaatattccagcgaacagttccgtatgccgtacagcggcctgcgcggtcagcgtaccagcctgatcccgcatcagctcaacatcgctcatgatgttggtcgccgccacgcgccgcgcgtcctgctggctgacgaagtgggtttagggaaaaccattgaagccgggatgatcctgcatcagcaactgctctctggcgctgctgaacgtgtgctaattatcgtcccggaaaccttacagcatcagtggctggtagaaatgctgcgccgtttcaacctgcgctttgcgctatttgatgatgagcgttatgccgaagctcagcacgatgcttacaacccgtttgacaccgaacagctggtgatttgctcgctggattttgcccgtcgtagcaaacagcgcctggaacatctctgtgaagccgaatgggacctgctggtggtcgatgaagcgcatcacctggtgtggagcgaagatgcgccaagccgtgaatatcaggccattgaacaactggcagagcacgtgccgggcgttctgctgctgaccgcgaccccggaacagctggggatggaaagccacttcgcccgtctgcgtctgctggacccgaaccgtttccacgattttgcgcagttcgttgaagagcagaaaaattatcgtccggttgcggacgccgttgccatgctgctggcaggtaacaaactgagcaatgacgaactgaacatgctcggcgagatgatcggcgagcaggatatcgagccgctgttgcaggcagcaaacagcgacagcgaagatgcccagagcgcccgtcaggagctggtttcgatgctgatggatcgccacggcaccagccgcgtgctgttccgtaacacgcgtaacggtgtgaaaggattcccgaaacgcgagctgcacaccattaagctgccgctaccgacgcagtatcagacggctattaaagtctccggcattatgggcgcacgtaaaagtgcggaagatcgtgctcgcgatatgctctacccggagcgtatttatcaggaatttgaaggtgataacgccacctggtggaacttcgatccgcgcgttgagtggctgatgggctacctgaccagccatcgctctcagaaagtgctggtgatctgcgccaaagctgccactgcgctgcaactggagcaggtactgcgcgaacgtgaaggtattcgcgctgcggtgttccacgaaggtatgtcgattatcgaacgtgaccgcgctgccgcctggtttgccgaagaagacaccggcgcacaggtactgctgtgctcagaaatcggttctgaaggacgtaacttccagttcgccagccacatggtgatgtttgacctgccattcaacccggatctactggagcagcgtattggtcgtctggatcgtatcggccaggcgcacgatattcagatccatgtgccttatctggagaaaaccgctcagtcggtgctggtgcgctggtatcacgaaggtctggatgcatttgagcacacctgcccgaccggacgcactatttacgatagcgtatacaacgatctgattaactatctggcttcaccggatcaaaccgaaggctttgacgatctgatcaaaaactgccgcgagcaacatgaagcgctgaaagcacagctggaacagggtcgtgaccgcctgctggaaatccactccaacggtggcgaaaaagcccaggcactggcagaaagcattgaagagcaggatgacgataccaacctgatcgccttcgccatgaacctgttcgatattatcggtatcaatcaggacgatcgcggcgacaacatgatcgtgctgacgccgtccgatcatatgctggtgccggacttccctggcctgtcggaagatggcatcaccatcacctttgatcgtgaagtggcgctggcgcgtgaagatgcacagtttattacctgggagcatccgctgatccgcaacggtctggatctgatcctttctggcgataccggtagcagcacgatttcactgttaaaaaacaaagcgttgccggtaggtacgctgttggtggaactgatttatgtggttgaagcccaggctccgaagcagttgcagctcaaccgcttcctgccaccgacgccggtacgtatgctgctggataaaaacggcaacaacctggcggcgcaggtagagtttgaaacctttaaccgccagcttaacgcggttaaccgtcacaccggcagcaaactggttaacgccgtgcagcaggatgttcacgctatccttcaactgggtgaagcgcagatcgagaaatctgcccgtgcattgattgatgcagcgcgtaacgaagccgacgaaaaactgtctgccgagctgtctcgtctggaagctctgcgtgcagtgaacccgaacattcgtgacgacgaactgaccgccattgagagcaaccgtcagcaggtaatggaaagcctggatcaggcaggttggcgtctggatgccctgcgtttgatcgttgtaacgcatcagtaacggagccgaaaatggggatggaaaactacaatccaccgcaggaaccctggttggttatcctgtatcaggatgaccatattatggtggtcaacaagccgagcggtttgttgtcagtgccgggtcgtctggaagagcacaaagacagcgtgatgacgcgcattcagcgtgattatccgcaggcagaatcggtgcatcgtctggatatggctaccagcggcgtgattgtagtggcgctgaccaaagccgcggagcgggagttaaaacgccagttccgcgagcgcgagccgaaaaagcagtatgtggcccgcgtctgggggcatccatcccccgcagaaggtctggtggatctgccgctgatttgcgactggccaaaccgcccgaaacagaaagtctgttacgaaacgggtaaacctgcgcagacggaatatgaagtggtggagtatgcggcggataacacggcaagagtggtgttaaaaccgattaccgggcgttcgcatcaattgcgtgtgcatatgctggcgctaggtcatccgattctcggcgatcgtttttatgcatcaccagaagcgagagcgatggcaccacgtttgttgctacatgcagagatgttgacgattacccatccggcgtatggcaatagtatgacgtttaaagcgccagcggatttttaacctttcctgtacgtttataccctcatcctaagggctgcctcttgtacataaatccccgagtccggggattttttgtttctgccaaactgctttcagttgttgcgtgtggctacgctttccattcggtaattcccttcctgctccacagcgaatttttgaactttttcttcacccgttgaccgtctcttatatttcattttaacgggtctgttatggtcctttctgattgttattcatgggctaattagcagtctggttggcgatgcccatctcggtgatccgtgtcctgcacgacgccttgcgtcactagcctcttctctagctcatcatgcaggtctttctaattgtgaaatcatcccacgctactgctaaggttgaaggggcgttccagccccttcaaccttagcttattctggctcattcaataattgcgttgtcagtaatttgttcagcagtacttttttagtagcaacttcttcagtagcaactcctttagtatcaatttttttgggggggattttattaataataattacctcatcatatagggaggtagcaccgttcacggtagcaccgtccaggatagcaccgtccaggttagcaccgtccgggttagcaccgtccggggtagcaccgtccggggtagcaccgcccaggttagcattccacccaggtctctcataaaggatatcattgctacctttcattgtttttttaccaaggtaacaatccctcatgtcaacgccgggaaggtaagcctttctaagatcaacgcccaagttaccttggcccttatgcagctgcaacgtctgagtacatatcttattcttttcaatgaaaaaagtgacacttaactcgatatccccgaaggtctgggcgacccagcgcatattgccctttgcgaccaactcatccggattttttgcgcatgttttaagtttattgaataattccaggctattgataaacttttctctctcattctcgttgatagccccagtaaagtattctgaggcgttgatgttgccagtctggttattcacgaaattgaacagaagtttataagcctcagtctgtttatctgaccagaacagatggcgtaacgtctcccacaagcgttgaaagatattcatcttcacgtccatcttgtccccgctcaccatcttataaatatcgttcttgctcatatttaaaagtgtaaccggcatgcctggaactgatactttcatggtaatagcctcgcattgagttaaaaactcatgatgcgcgttctgaataaatatactttcaaaaatcgctcattcaggtatgtgttttttatttttaagacgtaaaaatataattccgctcgtcgtaaagctctcaaccttaagcagggtcaacgcgataaaacctacagaacccctcccgtaaaccgtgcattgagcctgtccaccattctgagtaaacgccttttctcaaagaagtgaccgccagggcggccacctttaatcgtgggcagttactcagcatcatttacagggtcatttaaaccctttctgctgctttatcagctcatatgcctgctgaatttcctgcgctttctgcttcgccatctccatcatctcaggcggcaaacctttcgccaccagcttatcgggatggtgttcactcatcagcttacggtaggcacgtttgatggtggtcgcatcatccgtcggcttcacgcccagcacattacaggcatcttccagcgttgggccacgctgcgcttgctgccagttaccaccgccagtttgctgctgataaccgccgccaaactgtgcaccgccctgcatcatgcgcaaaaactggtcaaactgagcgcgggagatccctaattcttctgcaatgacatacagcaccgcccgttcattcgggtgcagtgaaccatcagcaaacgccgcctgaatctggatctccagaaacatacgaattaagtcaaaacgaccaaagcagacactgcgaaactggcgcatcttttcgcgcagcgggtaattgtctgattttcccacccggaacgcattttgcgccgcagtacgggaagcgccatgaagattcattcggtccatcaactggctggcgatatgaatatcagcctccgtgacgcgacctttggatttggttaaatgccccatcacttcaaaagtggtggcaaaaaacagcgcctgacgctcacgctggttggcgaaccacgccattttacggctacgggctttatcaaacatatggccaattaacaggcctaacactacgccccaaaagccgccgcccatcagtaaggccacggccacgccaatgatttttccccaatactgcatatattccccaaatcgacacacggatatcagggctatctcccacaatataaaggtgcttttaccgttttccggctgcggtcaattgtgggacatcgcctataatttgcattatcatacctgtcattcaatgccgtgcctaacaccactgacgctattcggacaggattaacactagcgtagagatgacgagtacgttagtctctgaccgtttgtcacgcgcaacgttaccgatgatggaacaataaaatcaacgtatgaaaaaacgtatccccactctcctggccaccatgattgccaccgccctttatagtcaacagggactggcagccgacctcgcctcacagtgcatgttgggcgtgccaagctatgaccgtcctctggtacagggcgataccaatgacttacccgtgactatcaatgctgaccacgcgaaaggggactacccggatgacgccgtgtttactggcagcgtggatatcatgcagggtaacagccgtctgcaggccgacgaagtgcagctccatcaaaaagaggcaccaggacaaccggagccggtacgtaccgttgatgcgctcggtaatgtccattacgacgataaccaggtgatcctcaaagggccgaaaggctgggcgaatctgaacaccaaagataccaacgtctgggaaggtgattaccagatggtgggtcgccagggtcgcggtaaagcggacctgatgaaacaacgtggcgaaaaccgctataccattctggataacggtagctttacctcctgtctgccgggttctgacacctggagcgtggtaggtagcgaaattattcatgaccgcgaagaacaagttgcggagatctggaacgcccgctttaaggtgggtccggtaccgatcttttatagcccctatttgcagttgccggtgggtgacaaacgtcgctctggtttcttgatcccgaacgccaagtacaccaccaccaactactttgagttctacctgccatattactggaacatcgcgccaaatatggatgccaccatcacgccgcattatatgcatcgtcgtggcaacatcatgtgggagaacgaattccgctacctctcccaggcgggcgctggcttgatggaactggactatctgccttcagataaagtctatgaagatgaacacccgaacgatgacagttcacgtcgttggttattctactggaaccactccggggtcatggatcaggtgtggcgtttcaacgtcgactacaccaaggtcagcgatcctagctacttcaatgatttcgataacaagtacggttccagtactgacggctacgcaacgcaaaaattcagcgttggctatgcggtgcaaaacttcaatgccaccgtttcaaccaagcagttccaggttttcagcgaacagaacaccagtagctactcggcagagccgcagttagacgttaattactaccagaatgatgttggtccgtttgatacgcgtatttacggccaggcagtgcactttgttaacaccagagacgacatgcctgaagcaacccgtgttcacctggaaccgaccatcaatttgccgctctctaataactggggcagcatcaataccgaagcgaagttgctggcaacccattatcagcaaaccaatcttgactggtataactccagaaacacgaccaagctggacgaatccgttaaccgcgtaatgccgcaattcaaagttgacggcaaaatggtctttgaacgcgatatggaaatgctggctccgggttatacccaaacgctggaaccgcgcgcgcagtatttgtacgtgccgtatcgcgatcagagcgacatctataactacgactcgtctctgctgcaatctgactactctggcctgttccgggaccggacttacggcggtcttgaccgtattgcctccgctaaccaggtgacgaccggtgtcacatctcgcatatatgatgatgctgccgttgaacgttttaatatttccgttggtcaaatctactatttcacggagtctcgcactggcgatgacaacataacatgggagaatgacgacaaaacgggttcactggtgtgggcaggcgatacttactggcgtatctccgagcgttggggattgcgtggcgggattcagtacgatacacgtctggataacgtagcgaccagtaactccagcattgaataccgtcgggatgaagaccgtctggtacagctgaattaccgttacgccagcccggaatatattcaggctacgctgcctaagtactattccactgctgagcaatataagaatggtatttcgcaggtaggtgctgtcgccagctggccaattgccgatcgttggtccattgttggggcctactactacgacaccaatgctaacaagcaagccgactctatgttaggtgtgcaatacagctcctgctgctatgcaattcgcgtcggttacgagcggaagctgaacggttgggataacgataaacaacatgcggtatatgacaacgcaatcggctttaacatcgaacttcgcggcctgagctccaactacggtctgggtacgcaagagatgctgcgttcgaacattctgccgtatcaaaacactttgtgatttgttgatttaccacgtaatccgcagtgcggttaattgaaatggaaaaagtatgaagaactggaaaacgctgcttctcggtatcgccatgatcgcgaataccagtttcgctgccccccaggtagtcgataaagtcgcagccgtcgtcaataacggcgtcgtgctggaaagcgacgttgatggattaatgcagtcggtaaaactgaacgctgctcaggcaaggcagcaacttcctgatgacgcgacgctgcgccaccaaatcatggaacgtttgatcatggatcaaatcatcctgcagatggggcagaaaatgggagtgaaaatctccgatgagcagctggatcaggcgattgctaacatcgcgaaacagaacaacatgacgctggatcagatgcgcagccgtctggcttacgatggactgaactacaacacctatcgtaaccagatccgcaaagagatgattatctctgaagtgcgtaacaacgaggtgcgtcgtcgcatcaccatcctgccgcaggaagtcgaatccctggcgcagcaggtgggtaaccaaaacgacgccagcactgagctgaacctgagccacatcctgatcccgctgccggaaaacccgacctctgatcaggtgaacgaagcggaaagccaggcgcgcgccattgtcgatcaggcgcgtaacggcgctgatttcggtaagctggcgattgctcattctgccgaccagcaggcgctgaacggcggccagatgggctggggccgtattcaggagttgcccgggatcttcgcccaggcattaagcaccgcgaagaaaggcgacattgttggcccgattcgttccggcgttggcttccatattctgaaagttaacgacctgcgcggcgaaagcaaaaatatctcggtgaccgaagttcatgctcgccatattctgctgaaaccgtcgccgatcatgactgacgaacaggcccgtgtgaaactggaacagattgctgctgatatcaagagtggtaaaacgacttttgctgccgcagcgaaagagttctctcaggatccaggctctgctaaccagggcggcgatctcggctgggctacaccagatattttcgatccggccttccgtgacgccctgactcgcctgaacaaaggtcaaatgagtgcaccggttcactcttcattcggctggcatttaatcgaactgctggatacccgtaatgtcgataaaaccgacgctgcgcagaaagatcgtgcataccgcatgctgatgaaccgtaagttctcggaagaagcagcaagctggatgcaggaacaacgtgccagcgcctacgttaaaatcctgagcaactaatggttaaaacccaacgtgttgtgatcactcccggcgagcccgccgggattggcccggacttagttgtccagcttgcacagcgtgagtggccggtcgaactggttgtttgtgccgatgccactctccttaccaaccgggcagcgatgctcggtttgccgctcaccctccgcccttattcccccaactcccctgcacaaccgcaaactgcgggcacattaacgctacttcctgtcgcgctacgtgcacctgtcactgcggggcagttagcggttgaaaatgggcattatgtggtggaaacgctggcgcgagcgtgcgatggttgtctgaacggcgaatttgccgcgctgatcacaggtccggtgcataaaggcgttattaacgacgctggcattccttttaccggtcataccgagtttttcgaagagcgttcgcaggcgaaaaaggtggtgatgatgctggcgaccgaagaacttcgcgtggcgctggcaacgacgcatttaccgctgcgcgatatcgcagacgctatcacccctgcacttttgcacgaagtgattgctattttgcatcacgatttgcggaccaaatttggtattgccgaaccgcgcattctggtctgcgggctgaatccgcacgcgggcgaaggcggtcatatgggtacggaagagatagacaccattattccggtgctcaatgagctgcgggcgcaggggatgaaactcaacgggccgctgcctgccgataccctgtttcagccgaaatatcttgataacgccgacgccgtgctggcgatgtaccacgatcagggtcttcccgtgctaaaataccagggcttcgggcgcggtgtgaacattacgctgggcctgccctttattcgcacatcagtggaccacggcaccgcgcttgaactggcgggacgtggcaaagccgatgtcggcagttttattacggcgcttaatctcgccatcaaaatgattgttaacacccaatgaataatcgagtccaccagggccacttagcccgtaaacgcttcgggcaaaactttctcaacgatcagttcgtgatcgacagtattgtgtctgccattaacccgcaaaagggccaggcgatggtcgaaatcggccccggtctggcggcattgaccgaaccggtcggcgaacgtctggaccagctgacggtcatcgaacttgaccgcgatctggcggcacgtctgcaaacgcatccattcttaggcccgaaactgacgatttatcagcaggatgcgatgacctttaactttggtgaactggccgagaaaatgggtcagccgctgcgtgttttcggcaacctgccttataacatctccacgccgttgatgttccatctgtttagctatactgatgccattgccgacatgcactttatgttgcaaaaagaggtggtgaatcgtctggttgcaggaccgaacagcaaagcgtatggtcgattaagcgtcatggcgcaatactattgcaatgtgatcccggtactggaagtaccgccgtcagcctttacaccaccacccaaagtggattccgccgtcgtgcgcctggttcctcatgcaacgatgcctcacccggttaaagatgttcgtgtgttgagccgcatcaccaccgaagcctttaaccagcgtcgtaaaaccattcgtaacagcctcggcaacctgtttagcgtcgaggtgttaacgggaatggggatcgacccggcgatgcgagcggaaaatatctctgtcgcgcaatattgccagatggcgaactatctggcggagaacgcgcctttgcaggagagttaacgatgatcaattcgccccgagtgtgtattcaggttcaaagcgtctacattgaggctcaatcttcacctgataatgaacgttacgtttttgcttataccgtaaccatacgcaatctggggcgagcgccagtgcagttgttggggcgttactggctgatcaccaatggcaatggccgtgaaaccgaagtccagggcgaaggagtggttggcgtccagccacttatcgcgcctggcgaagagtaccagtacaccagcggtgcaatcattgaaaccccgctgggcaccatgcagggtcactacgaaatgatcgatgaaaatggcgtccctttcagcatcgacattcccgtattccgactcgccgttcccacactcattcattaaaagaatatggcgacataccttattggcgacgttcatggttgttacgatgaactgatcgcattgctgcataaagtagaatttacccctgggaaagataccctctggctgacgggcgatctggtcgcgcgcgggccgggttcgctggatgttctgcgctatgtgaaatccttaggcgacagcgtacgtctggtgctgggcaatcacgatctgcatctgctggcggtatttgccgggatcagccgcaataaaccgaaagatcgcctgacaccgctgctggaagcgccggatgccgacgagctgcttaactggctgcggcgccagcctctgctgcaaatcgacgaagagaaaaagctggtgatggcccacgcagggatcacgccgcagtgggatctgcagaccgccaaagagtgcgcacgcgatgtagaagcggtgctatcgagtgactcctatcccttctttcttgatgccatgtacggcgatatgccaaataactggtcaccggaattgcgggggctgggaagactgcgttttatcaccaacgcttttacccgtatgcgtttttgcttcccgaacggtcaactggatatgtacagcaaagaatcgccggaagaggcccctgccccactgaaaccgtggtttgcgattcctggccctgtcgctgaagaatacagcatcgcctttggtcactgggcatcgctggagggcaaaggtacgccggaaggtatatacgcgctggataccggctgctgctggggtggtacattaacctgcctgcgctgggaagataaacagtattttgtccagccgtcgaaccggcataaggatttgggcgaagcggcggcgtcttaaacacagcctgatataggaaggccggataagacgcgaccggcgtcgcatccggcgctagccgtaaattctatacaaaattaccgccgctccagaatctcaaagcaatagctgtgagagttctgcgcatcagcatcgtggaattcgctgaataccgattcccagtcatccggctcgtaatccgggaaatgggtgtcgccttccacttctgcgtcgatatgcgtcagatacagtttttgcgcttttggcaagaactgttcataaacgcgaccgccgccaatcaccatgatttctggtacgtcaccacacgccgcgatggcttcatccaccgacttcacccacgttacgcgatcgtccgtacccggttgactgctgaggataatatttttgcgtcctggcaacggacgaccgattgattcccaggtatggcggcccataatcacgggtttatttaaggtgttgcgtttaaaccaggcgagatcggcaggcaggttccacggcatggcgttttccatgccgataacgcgatctaccgctaacgccgcaatcagactgatcattgagatttcccgataaaaaaaattgtcgccactatacgtaaagcgtaaaccgtcgtcgactggtgcgaggatgatgttgaggaaaattttatattctgctggcgagtccacgctctctccctggactcgccgcattacaatgaaacaaaaacaaacagttagctgtaaagtgtgatttacgtcactctttattaggatgagggtttcgtttccggttcatccgccatgttgccggtatgtttaccttcttcggttccctgccagccatgtcgttgaattaatgacagatgttcgcggtcctcggtaatgatctcacttaacatcgcgctggtgcgtttatagaccgccgcgcgggctttggtgtcgttctcaaccattgccatctcttccaccatctgaatattaaagcggcggaacacatcggcacgttctcgcgcttcatacggccccagacctaaactttccagtgccagacgcccggttttcagcgcaccttcgaaggtttcacgctccggcttttcaacgcctgcctgacgcaaacgaatgtagtggtcgacatcgcgggcgcgggcaataatctgcaaatgcgggaaatgttctttcaccatctctgtcagttgcaggttggtttgcggatcgtcgatggcgttaatcagcacttccgctttcgccgctccggcagattccagtaaatccatccgcgtggcatcgccataaaacactttcataccaaatttacgcaaggtttcgatatggtccggatcgtgatcgagtaccaccattttcaccccgctggagagcagtaaacgtccggtaatctgcccaaaacgaccgaatccggcgataatcacgcgcggctgttcttcgtcgatctcatcggcttcacgcgcttcctcagtagaagattgctcaaggcgattgaggatcaccagcagaatcggcgttgctgccatcgacagcgccaccgccagggtcagcgatttcgcccactccggctccagcacattcgccatctgcgccgcgccaaataccacaaaggcaaactcactgccctgccctaacaacaccgcaaaccaacgacgctgtttatttggcacttgcaacggtcgggcaatcagccacagcatggcgattttgatgatgaggaaaccgagcagcaaaatgacaatgcgcaatgggttttcaagcagcgtgccaaagtctatcgacatgccaacaccgatgaaaaacagccccaacagcaaacctttaaatggttcgatatcgctctccagcgcatgacggtattccgagcttgccagcagtacgcccgccagaaacgcgcccatcgccatcgacaagccgacctcttccagcagcaaaccaaagccaaacacgaggaataacgccacggcactaaacacttcccgcaagccagagcgggctacaaaacgcagcgccggacgcgtgacatagcgccccagcaataccaccagcaccagcgcacccgccacttttaacgccgagagagcaaatgcgcccatcgtcgtcgaggcactgctcgttgccagtagcggaatcatcgccaccagcgggatcgccgcgatatcctggaacagcagcaccgcaaaggcactgcgacccatttgcgtcaccatcagattgcgttcattcatcgcctgcatggcaatcgccgtagaggagagcgccagcgtcatgccgatcaattccgcgacctgccagcgcagcccaagtaacatgcagaacagccccagcaggccgccgcaaatcaccatctgcaatgcgccacagccgaacactgccgcacgcagcttccacagcctttgtggatcgagttcgaggccgataataaacagcatcagcaccaccccaatctcggcaaagtgcagaatagattcggcatcggtcaccagtcgcagcccccacgggccaataatgcagccggcgatcaggtagccaagtaccgatcccagaccaagacgtaccgcaatgggtacaatcagcgctgccgaaccgagataaatcagcgcctgaatcagcgtatggctatccatgatgggcctcctgccattccagcagacgttgcttatagtgacgcgcctgcccttcgagggtttcgtcgtcacaaataaaggtgcagtgcatggcaaacggtggcagccagttcagcccgcagtagattgccgtcgcctgtagcggctgcgacagcacatcaaagcccggatgcgcaccaatttcaaaatggctttccccgccgccggtcgtcaccgcccacagcaaatgtttgccatgcagcgccgtgccgccatgaccgtaagcccagccgtgggagaaaactttatcgatccaaagtttgaggagcggaggaatgctgtaccactgcatcggatgctgccagacgatcagatcggcgcgagacagcgcctcctgctcggcggcaatatcgatattgaagtcaggatagagttgataaagagagcgaatttcgacgccttccagcgtccttgcctgttcaagcatccgtttattcgcatgggaatgatgcggatacggatgcgcataaattataagaatcataggtagcccgcgtgattacgcctttgttttcccacaaagtgtagtcatatattcacgcggcttatagtcaataatattgattcagaaaagagagaaatctgaacaatttaccccattctctgcccgcggatcgtcatattgctggtctgcgccagtgacatccctcgagtctccggggcaaacgctacggaaatcaacaagccaaacagcgagatacccgcccccattagcatcgtgttactgataccgtaattattgataaagatcggtagtgcccaggtcgaaacaatggtgccaatacgacttaaggacataatcacgcccacggcagaggcgcggatatctgtcgggaagagttcattaggatagagccactgcaaattacccggcccgccagagaaaaaggcatacaccgcaaaggccatcactaccagccagatccccatatccgggattagccccaaaaccgccagcgccagcgtcatcatggcaaagctgccaatcaacaatggacgccgtccggcagtgtttaaccacagcatcggcggaatacagccgagcataaagaacaggctaatcaccacattccctagtgccgcgtttttgccaacccccaatcccaacaaaccaacgatttgcgggccaaaggtgtaaatggcgaacattgggatcacctggcaggtccagatggcggcaacaaacagaacaaaaggaaaatggcggcgattaaacagatcgcgaaaacgggtttgctgcggctgctcttcatcgaaagccaccggttcgccaaacagtttgatcatcatctcttcgcactcttttactcgccctttgcgtaataaccagcggggagattcaggcagttcgaatcgaccaatcaaaatcaacaaacaggggatcgccgcgctacccagcatccagcgccagccgccttccacatcataaagccagtagccgaccagatcggcacaggtcgcgccgacataccacatcgcggcaataaagctgatggaaaacgcccgctgacgggtactggagaactcggtgatcattgaggtggcgatgggataatctgcaccgatgacaatgccgataagtacccgcatcaccaacagttcgacgggggatgaaacaaacatcgtcgccaccgatatcacgccgatggcgatgatatcaatgaggaacattttgcgccgtccgactttatcggaaatataaccaaacagcgatgtgccaacgaacagcccggcgagcgttcccgcgcccagcaagccaatccagtcagcgtccagtttcagcgccggcgtcagttgctccagcgccacgccaatcattaccagtacataaccatccagaaacggaccaccgcttccccacagcaaaatgcggcggtgaatagaggagaatttgagatcgtcaaagtttctggacggttgcatggttattcctgttttttgcaatgagagtcagtgcggcgttacgtatcaaaccaacatcagccgtaacggaactccacaccaaaggtgccgcgcgggtattcccactgttccagcgccgaccccagccccagaatgcgacaggtgccgcactccagacatccggcgtaatcgaagcgcacactgccgtcatcctgcttcttgtacagacctgcggggcacgctttcaccagcagctccagcgcctgtttatcagcatcggccttcacaacaatgtgcggatgctcttcatcgacattgaatttattgacgcccagtttgacgtccacattgacgggagaagtcataaaacggtcactcctttcatgccatccttgattagattgatgaagcccactttcttgccgtggcggaggattttcttgcgcatcagttccggcgcgctgccatcaatggtgaacaggtcacgcgccacacccaccgccagctccgggtagccgctaaacatgcgtgggttatcaaggaacgccggtagtttctggtacatacgcatatcgcgcagcggaccactctcaagatgctgacgatattccgccagtttttgcttactgaaatcgtcgcttttcatcgctgaaagcacggtttttgctgcggcttccccggcggcaatcgccagatccataccgcgaatggtaaaaccgaggttcatacacattccggcggcatcaccggcaatcaatacgccgtcaccaaccaactccggcagcatgttgatgcctgcttccggcactacgtgagcggaatattccaccagcttgccgcccgcgatcagcggtgcaacggccggatgctgtttgaaatcttccagcatttgcggcaccgattttttcgcgtcatgcagatgatgcaaaccacaaaccagccccagcgacagggtgttttcattggtataaaggaagccgccgcccatcaggccatcggtgggtgatcccgcaaacaggcaagccgccccctgattaccctgcaactgaaaacggtcttcaataaccgacttcggtaactcgatcagttccttcacgccaaccgccacatccgtcggtttgacgcgttttgccatccccaatttttcggcaaggatggagttcaccccatcagcaaggatcaccgttttcgcttcaatcacatcgccatcggcttctacaccgacgactttgccatcgcgctgtacgaggttatcgacgcggatcccggtaattaactgcgcgcccgcttcttcggcctgctccatcagccaggcatcaaatttactgcgcaaaacggagtaagaacgctgggatggcgaggtttcgtcaccattgcagtagtccatagtcatcgctgacttttccgtcataaacgcgagtttttcatgggtgatcaggcgttctacgggggcggagtcggcgaaaccaggaataatgtgttccagactgtgggcatagagacgcccgccggtgacgttcttggcacctgcggaattgccacgctcgataactaacacttgcgcaccttcgcgggcgagcaccagtgcggcaaccgaaccggcaagccctgcaccgacgatgatggcgtcaaagatatcttcggacataagagctccctgtcagcggcagggccaaaatgcagccctgccagagtggatcaacgcgctaaagctgcggtcagcgccggaaggatcttcacggcgtcgccaacaatgccgtaatccgcgtactggaagatcggcgcatttttatctttattgatggcgaaaatggtttgcgacgcgttagcgccaaccatgtgctggatctgcccggagatccccaccgccaagtacagttcaggtttcagcatcaggttggagataccgacatagcgttcgtgctccatccatttttcgttttccgccaccggacgagaacaggccaactccgcacctatcgccttgcaaagctgttctgccagcgcaatgttctctttgctgccaataccgcgaccgacgctgaccaccagacgggctttgtcgagatcgacgctgttgctctggcgcgcctgggttgccgtgcgggtaatcgccacagccggagcctgccactccacggtgtgcgtttcgccagtgcgtgacgcgtctggctgagccgcatcgaacgtgccgctgctgatggtcagtaccgcatacggcgtggcaatgcgttcttcgccaatcgccagaccaccgtaaaccatgtgtttcactgtcgctttaccgtcctgtacgctgacggtgctggcatcgttagacaccgccgctttaaggcgataacccagttttgccgccagtaatttgccgcgacgggtgtttggcagcagcaccaggccgtctgcgccgtgctggcgaatagtgtcagccatgacaccggcgtaatcttcgatcatccgatcgtccggtttgccgtttaatttccagacatgattagcgccgagctggattgcctgtgcgccgtcggcatcattgaggacaaaggtgttgatttgattagctaaagcctgcgcaccgttcatcagttccggcagacgagaaggggtatcgctgaatacccagacttgagaaaacgtgttcatagcatcccctgtaattaaatgactttgcgaagattttcagcaaatgcggcgatctgttcttcgccgtcgccttcaatcacgatgcgctgacgttcgcgctgtttcggcgcggcaacctgttgttctgaccaggctgcctctgcgttaaaaccaatatccgccgccgaccatacctggacgggctttttcgccgcgccgagaatggctttcatcgaaggaatttgtggggaattgatatcagtggaaacagcaacaaccgcaggcagcggaatgcttaaggtttcggtttcatcttccagttcgcgctcaacggtgagggtatctgcagtcagggagataattttgctgacgccgttaactgccggaatattgaggatttcgcctaccagcaaaccaacctgctgggcataaaggtcggaagaaccatcgccacagaggatcaaatcaaagcctgctttctgggcggctgcagccagtgcgctcgccgtttgttgcggcagtgcctgctcgaactggtcatcaattaccacaatcagttcatccgggccgcgcgataacacatctttacgccctttggcgttggtcagggctttaccgcccacacttaaggctgtcacctgcgcctctgctgcctgttgctttagctggcaagccgcttcaatagcgttgagatcgtattggcttattttggcatcggctttgctgaagtctaatgaaccatcagcattattgaccgcaatatcctgttcatcaggcacgcacttatagcaagtaataatcttcattgcatctccagaaatcatgaaggaaacgtcgttcatatcggtggtgttaattacagatatcacgccctttaatttggaaataaaactttaatcaccaatattgaaaatgtcacacgcagataaatccaactttcaatattgttaagttcctcaccaatattgaaaacacggcgtagcaaaaagaaattttcaatattgttttatggatcaccaatattgaaagtcagatgttatttttttactcacaatagagcataacaaactgattattaatcaaaattaacgaaaaaacgccctctattcacccgaaacaaaaatgtgataccaatcacagaatacagcttattgaatacccattatgagttagccattaacgcgtccacgaggttaataataattatattaaatgttaacaaaaataaaacaaacgggaacgcaaaataaatattcgttttcacagtggaattaactcatgaagaatgaaaagagaaaaacgggaatagaaccgaaggttttctttccgccgttaataatcgtcggcatactttgttggcttacagtcagagatctggatgcagcgaatgtcgttattaatgctgtattcagttacgtcaccaatgtatggggatgggcatttgaatggtatatggtggtgatgcttttcggttggttctggctggtgtttggcccgtatgccaaaaagcgtttaggtaacgaaccgccagaatttagcaccgccagttggatctttatgatgttcgcctcctgtacgtctgctgccgtactgttctggggatcgattgagatctactactacatctccaccccgccgtttggcttagaaccgaactcgacaggggcgaaagagttggggctggcttacagcttgttccactggggacctctgccgtgggccacttacagcttcctttcagtcgccttcgcttacttcttctttgtccgcaaaatggaagtgattcgccccagctcgacactggtgccgctggtaggtgaaaaacacgccaaagggttgttcggcactatcgtcgacaacttctatctcgtcgccttgatcttcgcgatgggtaccagtctgggccttgccacgccgctggtgaccgagtgtatgcaatggttgtttggcattccgcataccctgcaactggacgctatcatcattacctgctggattatcctcaacgccatttgcgtcgcttgcggtctgcaaaaaggggtacgtatcgccagtgacgtgcgtagttacctgagcttcctgatgctgggttgggtgttcattgtcagcggtgccagcttcatcatgaactacttcaccgattcggtggggatgttgctgatgtatctgccgcgcatgttgttctataccgatcccatcgctaaaggcggcttcccgcagggctggaccgtgttctactgggcatggtgggtgatttatgctatccagatgagtatcttcctcgcccgcatctcccgtggtcgtactgtgcgtgaactgtgcttcggcatggtgctggggctgacagcgtcaacctggatcctgtggactgtactcggtagtaacactctgctgttgatagataaaaacatcatcaacattccaaatctgatcgaacagtacggtgtggcgcgcgccatcattgaaacctgggccgctctgccactcagcaccgccaccatgtggggcttcttcatcctctgctttattgccaccgttacgctggttaacgcctgctcttataccctggcgatgtccacttgccgcgaagtacgcgatggtgaagaaccaccgctgctggtgcgtatcggctggtcaattctggttggcattatcggtattgttctgctggcgctcggcggcctgaaaccgattcaaaccgccattatcgccggaggatgcccgctgttcttcgtcaacattatggtgacgctctcctttattaaagacgcgaaacagaactggaaagattaattaacccccaaaatatcaagaggttgaaagatggattttaatttaaatgatgagcaggaactgtttgtcgccggtatccgcgaactgatggccagcgaaaactgggaggcctattttgccgagtgcgaccgtgacagcgtctacccggaacgttttgtcaaagcactggcggatatgggtatcgacagtctgctgatccctgaagagcacggtggtctggacgcggggtttgttactctcgccgccgtgtggatggagctgggacgtctgggggcaccaacctatgtactgtaccagttgccgggcgggttcaataccttcctgcgcgaaggcacacaagagcagatcgacaagattatggctttccgcggcaccggtaagcagatgtggaactcagcgattaccgaaccgggcgcgggctccgacgtgggtagcctgaaaacgacttatacccgtagaaatggtaagatttatcttaatggtagtaagtgttttattaccagtagcgcctacaccccgtacatcgtggtgatggcgcgcgacggggcttctccggacaaacctgtctacaccgaatggtttgttgatatgagcaaaccgggcatcaaagtgaccaaacttgagaagctcggtctgcgtatggatagctgctgtgaaatcacctttgacgatgtggaactggacgagaaagacatgttcggtcgggaaggtaacggctttaaccgcgtcaaagaagagttcgaccatgaacgtttcctggtagccctgaccaactacggtacggcgatgtgcgcctttgaagatgcggcgcgctacgccaaccagcgcgtgcagtttggcgaggctattggtcgtttccagttgattcaggaaaaattcgcccacatggcgatcaaattaaactccatgaaaaacatgctgtatgaagcagcgtggaaagcagacaacggcaccatcacctctggcgatgcagcgatgtgcaaatacttctgcgccaatgcggcatttgaagtggtggatagcgcaatgcaggtgctgggcggtgtcgggattgcgggcaaccaccgcatcagccgcttctggcgtgacctgcgtgtagaccgcgtttccggaggatctgacgaaatgcagatcctgacgctgggtcgtgcggtgctgaagcaataccgctaagtccgtgcgctgcctgatgcgacgctgacgcgtcttatcaggcctacgggagcacgaatgtaggccggataaggcgtttacgccgcatccggcagtcatgcgctacataaatttttcaggagcaaataatggatcatctacccatgccgaaattcgggccgttggccggattgcgcgttgtcttctccggtatcgaaatcgccggaccgtttgccgggcaaatgttcgcagaatggggcgcggaagttatctggatcgagaacgtcgcctgggccgacaccattcgcgttcaaccgaactacccgcaactctcccgccgcaatttgcacgcgctgtcgttaaatattttcaaagatgaaggccgcgaagcgtttctgaaattaatggaaaccaccgatatcttcatcgaagccagtaaaggtccggcctttgcccgtcgtggcattaccgatgaagtactgtggcagcacaacccgaaactggttatcgctcacctgtccggttttggtcagtacggcaccgaggagtacaccaatcttccggcctataacaccatcgcccaggccttcagtggttacctgattcagaacggtgatgttgaccagccaatgcctgccttcccgtataccgccgattacttttctggcctgaccgccaccacggcggcgctggcagcactgcataaagcgcgtgaaaccggtaaaggcgaaagtatcgacatcgccatgtatgaagtgatgctgcgtatgggccagtacttcatgatggattacttcaacggcggcgaaatgtgcccgcgcatgagcaaaggtaaagatccctactacgccggttgcggtctgtataaatgtgccgacggctacatcgtgatggaactggtgggcattacccaaattgaagagtgctttaaagatattggcctcgcacatctgcttggcacgccagaaatcccggaaggcactcagcttatccaccgtatcgaatgcccttacggcccactggttgaagagaaactcgatgcctggctggcgacacataccatcgcggaagtaaaagaacgctttgctgaactgaatatcgcctgcgccaaagtgctgaccgtaccggaactggaaagcaatccacagtatgtggctcgcgaatcaatcactcagtggcaaacgatggatggtcgcacctgcaaagggccgaacatcatgccgaaattcaaaaataaccccggacaaatctggcgcggaatgccctcacatggcatggacacggctgccattttgaaaaatatcggctacagcgaaaacgacattcaggagttggtcagcaaaggtctggccaaagttgaggactaaacgcgtggcgtcagtcggcttgcctgactagcgcccgcccaataacaaacgaacaaaaatggatagaggtgcaatggatatcattggcggacaacatctacgtcaaatgtgggacgatcttgcggacgtttacggtcataaaacggcgctgatttgtgaatccagcggcggagtcgttaaccggtatagttatcttgagttaaatcaggagattaaccgcacggcaaacctgttttatacgctggggattcgcaaaggcgacaaggttgcactacatctcgacaactgcccggaatttatcttttgctggttcgggctggcaaaaattggcgcgattatggtgccgattaacgcccgcctgttacgcgaggaaagcgcgtggatcctgcaaaatagccaggcgtgcctgctggtaaccagtgcgcaattctatcctatgtatcaacagattcagcaggaagatgccactcaattgcggcacatttgcctgacagatgtggcacttcccgctgatgatggcgtgagttcgtttactcaactgaaaaatcaacaacctgccaccttgtgctatgcaccgccgctatcgactgacgatacggcggaaattctcttcacctccggcaccacctcccgaccgaaaggtgtggtgattacccattacaacctgcgcttcgctggatattactccgcctggcagtgtgcactgcgtgacgatgacgtctacctgacggtaatgcctgcgtttcatatcgattgccagtgtactgcggcgatggcggcgttttctgccggggccacctttgtgctggtcgagaaatacagcgcccgcgccttctggggacaggtacagaagtaccgcgccaccgttaccgaatgtattccgatgatgatccgtaccttgatggtgcagccgccttcagcgaacgatcggcaacaccgcctgcgggaagtgatgttttatctcaacttgtcggagcaggaaaaagatgcgttttgtgaacgcttcggcgttcgcttgctgacgtcttatgggatgacggaaaccattgtgggcattatcggcgatcgccctggcgataaacgacgctggccgtcgattggtcgagcggggttttgctacgaagcggagatccgcgacgatcacaattgcccgctcccggcaggtgagatcggtgaaatctgtattaaaggcgtaccagggaaaaccatcttcaaagagtattttctcaacccgaaagccactgcgaaagtgctggaagctgatggctggctgcataccggcgataccggataccgcgacgaagaaggctttttttatttcgtcgatcgccgctgcaatatgatcaaacgcggtggcgagaatgtctcctgcgtggagctggaaaatatcatcgccacccatccgaaaattcaggacatcgtggttgtgggtattaaagattcgattcgcgatgaagccatcaaagcatttgtggtgctgaatgaaggtgaaacattgagcgaagaggaattttttcgcttctgcgaacaaaatatggcgaaatttaaagtgccctcttatctggagatcagaaaagatctgccacgtaattgctcggggaaaataattagaaagaatctgaaataaatgaaacggcagggaactaccctgccagctaataatcacgctctaaaacaatatgcattttttgcaggaatgttgtcgtccctgaaaaagcaaaaatggagaaaaggaatgagtgaatcattacatctgacccgcaatggatcaattctggaaattacccttgatcgcccaaaagcgaatgctattgatgcaaaaaccagctttgaaatgggcgaagtatttctaaatttccgtgacgatccgcaattacgtgtcgccattattaccggtgccggagagaaattcttttccgcgggctgggatttaaaagcggcagcagaaggcgaagcaccggatgctgactttggcccgggtggttttgcgggattaaccgaaattttcaatctcgacaaaccagttatcgcagctgtgaacggctacgcctttggcggcggtttcgaactggcgctggcggcagattttattgtttgtgccgataacgccagcttcgccctgccggaagccaaactgggcatcgttcctgacagcggcggtgtgctgcgtctgccgaagatcctgccgcctgccatcgtcaatgaaatggtgatgaccggcagacgaatgggcgcagaagaggcgctgcgttgggggatagtcaaccgcgtggttagccaggcggaactgatggataacgcccgcgaactggcgcagcagctggttaacagcgctccgctggcgattgcggcgctgaaagagatctaccgcaccaccagcgaaatgccggtagaagaagcgtatcgctatattcgcagcggcgtgttgaaacactatccgtcggttctgcattcggaggatgccattgaagggccgctggcgtttgccgagaagcgcgatccggtgtggaaaggacgttaacaaccgtgagctattacgcctttgaggggttaattccggtggttcacccgacggcgtttgtccatcccagtgccgtcttgattggcgatgtgattgtgggagccggtgtctacatcggcccactcgcctcactgcgtggtgactacgggcggttgatcgtgcaagcgggagccaatattcaggatggctgcattatgcatggctactgcgacactgacaccattgttggggaaaacggccatatcgggcacggagcgatcctgcatggttgtgtgattggtcgcgatgcattggtcgggatgaacagcgtgattatggatggcgcggtcattggcgaagagagcattgttgccgccatgagctttgtcaaagcgggctttagcggcgagaaacgccagttgttgatgggtacgccagcccgcgctgtacgcagtgttagtgacgacgagttacactggaaacggttgaataccaaagagtatcaggatcttgtcgggcgctatcatgcatcgttacatgaaacgcagccgttgaggcaaatggaggaaaatcgcccccgtttgcaggggacaacggatgtgacgcctaaacggtgatcttgccggatgcggcgtaaacgccttatccaactctgctggagagcaaccgtaggccggataagatgcgccagcatcgcatccggcgatagctgtcggatgcggcataaacgccttatccaacccggctggagagcaaccgtaagccggataagatgcgccagcatcgcatccggcgaccaggtcgcacggtatcatcgaaatgacattaacgacgcatactctttgacaacatcatctgccacttctgctcgcggttaagttccgtgagcggaacggcaggaatacgcggtgtctttcttacgccgactaatttttcccgactgttattgcgcaggcgcgcgtaaatttgttcatcgatatcgaccactttaaccagtcgctgacactggcatccccgcccttccagcttattagggatcatcttaacttcgcagcttatttctgtgacttccgacagaatataagtcagggtattaaccgccttgctgtgttcaatatcgaaatgaatagagatctctcttgctatcacccaccgattttcagccatcatccattcggcgattaacaagtagagtggtttttcaacatatccttcacacatacgaactccagtttcacaaattaaaagtctggctatgactcgttttgaagcaattaaacaaggccatattaaaattgtggatatatcgatagtatgcaacttcaccgtcgataagtgtgagctaaatcctgcttatgtcatcaaaaatatcgattccccaaaagatttacttaatgggcaaaaaaaaacggtcctcatcagagaaccgtattagttattcgatcaaattagcggatgaaaaatatctgccatgacacgctattatttgatctgtgcgtgcatttcctgcaccgaaattactttttcagtcgcatcggcattcagcgccatcgcggtggcaaagccgccgttcagggtggtgtcgtaatgcactttatattgcagcgcactgcgacgaatcacgcgggagtcttcaatcgcacgacggcctgaggtggtgttgatgatgtaggtatattcgccattcttgatacggtcctgaatgtgcggacggccttcatgcaccttgtttaccagacgcgggttgatacctgcttcgcccagcacaatcgccgtgccgtgggtcgcatccagctcgaagccctgtttcagcagttttgccgccaggtccaccacgcgttctttatcgccttcgcgcacggaaagcagcgcacgaccgtgtttcttcatggtggagttgctgcccagctgcgctttggcaaacgcttcagcgaaggtgcggcccacgcccatgacttccccggtagagcgcatttctggccctaacagcgggtcaacgcccgggaatttattgaacggcagcaccacttctttcaccgagtagtacggcgggataacttctttggttacgccctgctcagccagcgatttgccagccatcacgcgcgccgccacttttgccagcggtacgccggtggctttggagacgaacggaacggtacgcgccgcacgcgggttaacttcaatcaggtagacttcgttgtttttcaccgcaaactgcacgttcatcaggccgcgcacctgcaattcgaaggccagtttctgcacctgctggcgcatcacatcctgaatttcctgacttaaagtgtaggctggcagcgaacatgcggagtcaccggagtgcacgcccgcctgctcaatatgctccatgatgccgccaatcagcaccatttcgccgtcgcagatggcgtccacatccacttctaccgcgtcatcgaggaagtggtccagcaacactggcgcatcgttagacacgctgaccgccgtctggaagtagcgacgcaggtctgcttcgtcatagacgatttccatcgcccgaccgccgagaacgtaagacggacgtaccaccagcgggtagccaatctctttcgccttctctaccgccatttcgatagcggtaacggtggcgttcgccggttgcttcagtttcaggcggtcaaccgcgtgctggaagcgttcacggtcttccgcacggtcgatagcatccgggctggtgccgataaccggtacgccagcggcttccagtgcacgcgccagtttcagcggggtctgaccgccgtactgaacgataacgcctttcggcttctcaatacgcacgatttccagcacatcttccagggttaccggctcgaagtagaggcggtcggaagtgtcgtagtcggtggagacggtttccgggttacagttaaccataatggtttcgtaaccgtcttcgcgcagcgccagcgaggcgtgtacacagcagtagtcgaattcgataccctgaccgatacggttcgggccgccgccgagaaccatgattttttcacggtcggtagacggattcgcttcgcactcttcttcataagtggagtacatgtaagcggtgtcggtggcgaactctgccgcacaggtatccacgcgcttataaaccgggtgcaggtcatactggtcgcgcagcttgcggatttccgcttcgcgcacgcccgccagttttgccagacgcgcatcggcaaagcctttgcgtttcagctggcgcaggaattcagcgttcaggccagtgatgcccacttccgctactttctcttccagacgcaccagttcttcaatctgtaccaggaaccagcggtcaatattggtcaggttgaagacgccgtccacagacaggcccgcacggaacgcatcggcgatgtaccagatacgatctgcgcctgcgtctttcagttcgcgacggattttggttaacgcttccgggtcatccaggctcactttcgggtcgaatccagtcgcaccgacttccaggccgcgcagcgctttttgcagggattcctgctgcgtgcgaccaatcgccatcacttcgccaaccgatttcatctgagtggtcagacggtcgttagcaccggcgaatttttcgaagttgaagcgaggaattttagtaaccacatagtcgatggacggctcgaaggaggccggagtacgtccgccagtgatgtcgttcatcagttcgtcgagggtgtaacccaccgccagtttcgccgccactttagcaatcgggaaaccggtcgctttcgacgccagcgccgaagaacgggacacgcgtgggttcatttcgataacaatcagacgaccgtttttcgggttcaccgcaaactgaacgttggaaccaccggtttcaacgccgatttcacgcagcaccgccatcgaggcgttacgcatgatttgatattctttgtcggtcagcgtttgggctggcgcgacagtgatggagtcaccggtgtggatgcccatcgcatcgaagttttcgatagagcagacgatgatgcagttgtcgtttttatcacgcaccacttccatctcgtactctttccagccgatcagcgactcatcaatcagcaactctttggtcggagagagatccagaccgcgggcgcaaatttcttcaaactcttcacggttataagcgataccgccgccgctaccgcccatggtaaaggatgggcgaataatgcacgggaagcccacgtcagcggcaaccgccagcgcttcttccatcgtgtgtgcgataccggaacgcgcggtttccagaccaattttcttcatcgctacgtcgaaacgacggcggtcttctgctttatcaatcgcatcggcagtggcaccaatcatggtgacaccgaactcttccaacacgccctgacgttccagctccagcgcgcagttcagcgccgtctgaccgcccatcgttggcagcaccgcgtccgggcgctctttttcaataatcttgcgtacaacttcccagtgaatcggctcgatgtaggttgcatcagccatttccgggtcggtcatgatggtcgccgggttggagttcaccagaatgacgcggtaaccctcttcacgcagggctttacacgcttgcgcgccagagtagtcaaactcacacgcctgaccgataacaatcgggcccgcacccagaatcaggatactttttatatctgtacgttttggcatggctcttttactcctgattacttagcggttttacggtactgctcaattaactcgataaagtggtcgaacaacggcgcggcgtcgtgtggaccagggctggcttcagggtgcccctggaagctgaatgccggtttatcggtgcgatgaatgccctgtaacgtaccgtcgaacagggatttatgcgtgacacgcaggtttgcaggtaatattgcttcgtccaccgcaaaaccgtggttctgggcggtgatcattaccacgtttttctccacatctttaaccggatggttgccgccgtggtgaccaaatttcattttgacagtcttcgcaccgctcgccagcgccagcagctgatgaccgagacagatgccgaataccggaatatcggtttcgaggaatttctggatggcggtaatggcgtaatcgcacggggccgggtcgccaggaccgttggagaggaagatgccgtctggattcattttcagcacatcttccgcagaagtttgcgccggaacgatggtcaggcgacagcctctatccaccagcatccgcaggatgttgcgcttggcaccaaaatcataagccacgacgtggaacggcagctcgtcttcttttttcgcttctggcaggccaccggtcaacgtccagctcccttgtgtccagctataggcttctgcggtggtcacttcttttgccagatccatgccattcagacctgggaacgcgcgggctttttctaacgccagcgccgcatccgggttatcgcccgcgataatgcagccattctgtgcgcctttctcgcgcagtaaacgcgtcagcttacgggtatcgatatcggcaatcgccacgatgttatggcgtttcaggtaagaagagaggtcttcggtattacggaagttgctggcaatcagcggcaggtcgcgaatcaccagaccttgtgcatgtacctgagaagattcttcatcggcgtcattggtgccgacattgccaatatggggataagtaagagtaacgatttgacgagaataggaaggatcagtgaggatttcttgataaccggtcattgaagtattgaaaacgacttccccaaccgccgaacctgttgcccctatggcccgaccgtgaaactgggttccgtcttccagaaccaatagcgctgacttaatcaaaacaccctccagagaatattcactcactttatttgcatattaattcacaatgatgacgtaaatcaatgcaaatctgcttaccgacgaatttctggcaaacggcggcattctggagatatgggcgctaaaagtcaacttaatggcaggattttttatattattttgtggctcatgcatgttttacaggcattaagcggcaaaaagatcatataacctgttctggaaaacgcttgcgcagcaagaagattgcatgaaataaaagcgagtagggaaaagtggaccaaatggtcaaaatttacattaaaacaacaaaaaccgaagacaaaacatgtaatttttggcacttatatacaatttaaaaacataacactaaaaataaaagggccaaaaattaaagccctttacaatcaataaattaaatgtgttatttttgcaccataacaaatattttgtggttacaaactattgagatcaagcacatctcgcatatcaaaaagaccactttccttaccactcaaccacaaagccgatcttaccgcgccgttagcaaatgtcatgcggctggacgccttatgggtgatctccagacgctcgccaatatcggcaaacatcgcggtatgttcgccaacgatgtcacctgcacgcacggtggcaaaaccaatggtgccaggcacacgttcaccggtgtggccttcacgactgtagaccgcgcaatctttcagatctttatcaagggcgtgggcgatcgcctctcccattgccagtgcggtgcctgacggcgcatcaactttatgtctatgatgtgcttcaataatttcgatatcggtgtagtcacccatcactttggctgctttctccagcagcttaagcatgacgttaacgccaacgctaaaattggcggcaaagacaatcgcaatatcggcggcggcgtcacgaatcgcctgtttaccggcttcgtcaaaccccgtagtgccgatcaccatccctttgccatgctggcgacaaaaagcgagatggttcagcgtaccttccggacgggtaaaatcgataaacacatcaaaatcatcttttatcgcatcaaggctgctttgcacggtaacgcctgttttccctgcaccagccagctcaccggcgtcgctgcccagtaaagaagatccttcgcgctccagcgccgcgcccagctgcacgccttctaatgccagcgccgcctgaatcaactggcggcccatacgccccccggctcccgcgatggcaacgcggatgtttgcatcatgcatagctattctcttttgttaatttgcatagaccgttttcagagtaaccagcgcatcgctacgccgccagccaaaaacgctgataattagaaattaatgataaacagggagggatatcagtgaaaggcatgagtcgatgaatgactgcatgccgataacatgtgacaggttacggcaccagagccagcaaatcagccacccactgttggaagccttttacattcagatccaatgccacctgtacattggctggtttgcccaggcaaccgtcgatatcaaccaccgtcgtgcctgaggtaaattcgccttgagtttctaccgcgacaaaacacggcttgagggtgaataagtccgggcgcaccagccaggcgatggcgcagagatcgtgcattcgcagaccgctttgcatactgccgctacggtagtggctaaacagggcgtggagcatttttccggtgcgattcaactccggtaaagtagcgagatagtcaggggttaatattgcctgattggtgacatccagaccgcacatgacaatttcgatgccgctacggaagacacaggcagccgcttctggatcggcagcgatattaaactcggcatttggtgtacagttgccgcgaccagcagaaccgcccatgatcaccagacggcgaatatgcggtttgcattccgggcattgtgaaagtaacagcgcaatattggttaacgggccgatggctaccagggtaacaggctctggtgcacgcatcagggcatcccgaatcgccagaaacgccggtacctcgagcggctttcggttgtgctcaacaaagtcgtagccagccattcccgatttgccgtgcacagatgccgcatcacgcggtgcgcgtaccagcggcacagcggctccctgggcgagcggaatctccgcattccagaaatgcagcagttgcaaggcattacgggtagttttctcaaccgagacattacccgcgacggtggtcatcagttgcaggtcgagttcgggggcaaaaatcgcggcggcaatggcgacggcatcgtcaatgccggggtcagtatcgaggaagataggtaaacgcatgttttctccataaaaaatgccggtaacaagaccggcattttcgcataacttaggctgctaatgacttaatcgacttcacgaatatcgacacgcagctctttcggcacttcgaaaacaatgttttcttcacggccttccagcggaatggcttcaccaccgcccagctgctgcaaacgtgccaccacattttgcaccagaatatccggagccgatgcgcccgcagtcacgccgacgcatttaacctctttcacccactcttcctggatatctttcgcatcgtcaatcaaaaacgcgcgtttgcccatacgctgggccagctccgccagacggttggagttggaggagtttttcgaaccgaccaccaacacaacttccgcctgttctgccagggcgcgtaccgcttcctgacggttagtcgtggcgtagcagatgtcatctttgcgcggaccgacaattttcgggaagcgtttacgcagcgcgtcgatcacatcagacgtgtcatccaccgacagcgtggtctgggtcataaaggagagcttctcttcgtttttgaccgtcagtttccacacatcgtccggcgattcgaccagatacattcccccttccgggttactgtactggcccatcgtaccttccacttccggatgcccggcgtggccgatgagaatcgactcttcgccacgacggctggcgcgggcgacttccatatgcactttggtcaccagcggacaggtggcatcaaacaccgtcaaatcgcggctttttgcttcgttacgtaccgcctgagaaacaccgtgtgcggagaaaatcaggatcgcgccgtccggtacttcgctaatctgctcaataaagatagccccacgctcacgcaagctatcgaccacatagcggttatgtaccacttcgtgacggacatatatcggtgcgccgtaaatggccagcgcgttttcaacaatgctgatagcgcggtctaccccggcacaaaaaccacgcgggttggccaacaggatctgcatgttacgcctccagtgccggatcgatttccagcacttcaatatcaaaatgaacggtctgcccggccagcggatggttgaaatcaacggtaatggagtcgccgttaatttcgcggatcacgccaggcatctcactgccatccattgcggtaaaaagcatgattgcgccaatttctggctcgcctgcatccataaattcacggcgggagaagtactgaatcaggtccggtgacggcacgccaaacgccgcatctggctccaacgagaaggtggttttatcgcccactttcagccccaacaggtgttgctccagcccttcagaaagagaagcatcacccaggcggaacagcgccggtttaccgttgttgcgggtagactcggcggtggtgccatcgtcgagttttagcgtgaagtgcaccaggacggcgctattgctctgtacagattcagacatgcaggtttgctcttatatttgaggatttttgccggatgcggcgtaaacgccttatccggcctacgatttcgcagcaatctgtaggccggataagatgcgtcagcatcgcatccggcagggtttattattgttttttcgctttagaaggtaaaaacccttccagcacgatcaacgccgcaccgacacaaatggcagtatcggcaaggttgaaggtggcgaagtgccagtcgccgacgtagaagtcgatcatatcgacaacgaagccgtgccacaggcggtcgaacaggttgcccagcgcgccgccaataatcagcgcataagcgatattgtttagcttctgcgtggccttcgagcgatacatcatcactgccaggatcacgctaataccaatcgcaataccggcaaagaaccaacgctgccagccgccgctatcggcaaggaaactaaacgccgcgccatagttacgcgcataatgcagattaagcgacgggaacagcgggaccgtatcccccagagcaaagttctggaggatcaggtatttgctgcccagatcgataatcagcacgactaccaccagccacagccagcgtagccctgttgaacagatcgattgactcatcaggcaaacttacgtttttcaccgtcaccggcgacgttgctgacacagcggccgcagatttctgcgtgttccgccaccttgccgacatcccgggtgtagtgccagcagcgtgggcacttctcaccttcggctttactcaacgcgactttcagccctttgagtacttcgctctgctgagcatcagcaggtgcgtcgttatagtctgcaacggtagcgccggaggtcaacaggacaaatcgtaattcatcgcccagcgcggtcagtttcgccgccagttccggttctgcatacaaggttactgccgcttccagcgagccacccactttcttgtcggcacgcgcttgctcaatgactttgttcacttcgccacgcactttcaacagctcgtcccagaacgcatcgttcatcgcttcactgtctgccaggccaaacaggccttcgtaccactcaccggtgaagacgtatttttcacgttcgcccggcaggtagccccacacttcatcagcggtgaaggagaggattggtgccatccagcgcaccagcgcttctgcgatgtgatacagcgcagtctggcagctacgacgcgccacactgtccgctttggcggtgtactgacggtctttgatgatgtcgaggtagaaggaacccatctcaacggagcagaagcgcatcagacgctgtaccacttcgtggaaatcgtatgcttcgtacgcgttgaggatgtcttcctgtgccgctttcgcacaacctacggcccagcgatccagtaccaccatctcttccggtttcaccatatcttttgctggatcaaaaccgttcaggtttgccagcaggaagcgcgcggtgttacggatacgacgatagctatcggcagcacgtttcaggatctcgtcagaaacggccatttcaccggtgtagtcggttgatgccacccacagacgcagaatatccgcgcccagtttgttcatcacatcctgcggcgaaacggtattgccgatggatttagacatcttgcgaccctgaccatccacggtaaagccgtgggtcagtacctgacgatacggcgctttgcctttcatcgcggtggagatcattagggaagacatgaaccaaccacggtgctggtcagaaccttccagatacatgtccgctgcgtgaccggcaaattccggacgcacgtcaacaacagaagagtgggtagatccggagtcaaaccatacatccaatgtgtccggcactttcacgtactgatcagcttcatcgccgaggatctctttcgcatcaagatcccaccacgcctggatgccgtcaacttcaacgcgttttgccacttcttccattagttcgagagtacgcggatgcagctcttccgtgtctttgtgcacgaacagtgacatcggtacgccccaggtgcgctgacgggagatacaccagtcaggacggttagcaaccatcgactcgatacgcgcctggccccagtccgggatccactgcacgcctttgatctctttcagtgactgcgcacgcagacctttctgatccatgctgacgaaccactgcggcgtcgcgcggaagatgatcggcgttttgtgacgccagcagcacggatagctgtgctgcattttctcaacgtgcagcagcgcgcctttttcctgcagcagcgcaacgacgatgtcgttcgctttgaagacgttcacgccatccagcgtcggataagtgcccggcagataagtgccgtccgggccaaccgggttagcggtttccaggccgtatttctgaccgatcacatagtcgtccgggccgtggccaggcgcggtgtgaacggcaccggtaccggcatccagggtaacgtgatcgccgaggattgccggaacgtcgaagcccataaacggatgggtaaagcgcagcaactcaagctccgcaccttttaccgtgccgagaatggtgtaatcggtcacgccgatacgctgcattacgctttcaaccagatctttcgccagaatcacggcctgaccgtcgatctgcaccagcgcatagtcgaaatcaggtgcaatagagattgcgcggttcgcaggcagagtccacggcgtagtggtccagatcaccagcgagattgggccgttaacgttgcttacggcaaattttgctttcagtgcatcctgatcgaccgcctgaaaagcaacgtcgatggacggagaagttttgtcgtaatactcaacttccgcttccgccagcgcagaacggcagtcaacgcaccagtgtaccggcttcgcgcctttgtgcaggtgaccgttgccgatgattttgcccagcgcgcggatgatgttggcttcagttttgaagtccatggtcaggtacgggtgcgaccagtcgcccagcacgcccagacggataaagtctttgcgttgaccgtcaacctgggtcgccgcgtattcgcggcacttggcgcggaactcggcggcggtgaatttctcacccggcttaccgtattcttgctctactttcagctcgatcggcagaccgtggcagtcccagccaggcacatacggcgagtcataaccggaaagccctttggacttcacgataatgtctttcaaaatcttgttaaccgagtgaccaatatgaatgctgccattcgcataaggagggccatcatgcagaatgaaggtttttttgccttttttagccgcacggatgatgccgtacagatcatcatcagtccaacgcgccagcattcccggttcgcgcttggcgagatcgccacgcatcgggaaccctgtttccggcaaattcagggttgatttatagtcactcatcagattctcggttccgtgtttcggtttgattacataacaggcttaagccggttttgttagcccaaaaaattcgcgggcggttaattcatcacgcgcaatctgcgctttcagttcgtccagcgacgcaaatcgctgctcattgcgtatttttttacgcagcactacttgtatatggcgaccgtaaaggtccattgcaacatctaacaaatgcacttccagctgctggcgaataccggcaaccgttgggcgtgttccgatgtttgccacgccgggtaacggcttttcaccgaggcccagcacttctaccgcataaacccctttcaccggggaaacctgacggcgtagcggtacattcgccgtcgggaaacctatagtgcgccctaattcatcaccgtggactacacgcccggagatggcaaacgggtgccccagtaaactttctgccagagccagattgtcatccgccagcgcctgacgcacagcggtgctgctaatacgcacgccaccttcgcaaaaagtttgcgtactagtgatatcgaagccgtattccatgccagctttctgtaataacaagaaatcgccttcacgaccagcgccaaagcggaaatcatcccctacggcaagaaattttacgcgcaaatgcttcaccagaagatcgctgatgaaattttgcgcggttaacgccgcgaaacgcctgtcgaaacgcacgcacagcacgtaatcaacgccacactctgcaaggtaacgcagtttttcccgcagccgggtcagccgtgccggggctttatcggtagcaaacagttccagtggttgaggttcaaaaagcatcaccatcaccggtaagttgcgcttgcgcccttcttcctgcaagccctgtaacagcgcgcgatgaccgcgatgcacgccgtcgaaattaccaatagtcagcacacacccttcttgcggggcctggctgagattatgtatgccgcgtatcagcttcatgtctggctcaaaacagtgaaaatcgtccgagtataccttgtacagcggtcaaggttaaccggcgattgagtaccgaaatcagaaagaagtggcttttcattgccatggcgcaaatcacgggaagaaactgaccgcctgctgcaatttttatcgcggaaaagctgtattcacaccccgcaagctggtagaatcctgcgccatcactacgtaacgagtgccggcacattaacggcgcttatttgcacaaatccattgacaaaagaaggctaaaagggcatattcctcggcctttgaattgtccatatagaacacatttgggagttggaccttggctaatatcaaatcagctaagaagcgcgccattcagtctgaaaaggctcgtaagcacaacgcaagccgtcgctctatgatgcgtactttcatcaagaaagtatacgcagctatcgaagctggcgacaaagctgctgcacagaaagcatttaacgaaatgcaaccgatcgtggaccgtcaggctgctaaaggtctgatccacaaaaacaaagctgcacgtcataaggctaacctgactgcacagatcaacaaactggcttaatcgccaatttgctgaagctttgtgaaaaagcccgcgcaagcgggtttttttatgcctgctgcttttgtgatgcgtgagagaacacactgccggttgccagatagtcaaaagttgcaggttcttgcagacatgccgttgtactatctgaactcttcgtggcttaagaatcgtagaaccatcggctgatacattctgaacaagaatatctactcaatctccagaccccctacaaagaatgtggatattgtgatacacattgaggtattaaacttaagaccactctatttttgaattaaattcctatatactttaaccattcataaatatctcctcattagaccttgtaaattattaacagcaatcaacacaggttaaatacctatttatattgtacttcttaaaattaatgagcgatttttgatagtagtcacattcactcataaattaaattaataaaaattcatcaacttcaaggactgataatgacagatggtatctcaacttcgccacattgtctttataaatcaaatatagtagatgatgtaataataaataaaacaagacaaaatgagttagtaaaagtgttttgcgagtataaaacagagttcttaattttgtttgatgactttttcagaagccaggattttcctaaaccatctccagtcctccatcatttttttcaatatactcatctgagagatgcacatttttatagatgtaaactcatagaacatacagttcaattttattttttaaacacaaaggcatcacattacttagattggatgtttttgatgacagaacaagcgaatgtctttctgaagagattaagatatatcaagaatgctatgaaaaattcgttaagttcttaaaggcaaacttcaacccggaaatatacccacagctatatactcctgaaatattttatgaggcctgcagaaatctccagtcattttatgctcatcaggagacgtcacaaaacgctaaatatagtgcaatagacaagaaaaaaagtcatcttaaccaggaaatcaaaaagctaattaaaaaaaatattttccctgagctatataatgaacaatgcaataaaatcccctcctcatcgaaagatgataaccagaaaataacatggcagaattttaaaactagcaattcggcatattcaaaactatgtggaaaattatctttatttaaaagcgtgcccagtcggttaatagaaaaatcagcttactgctcaactgaaaatatggccactaataaatttgatgtcgtcttttcttactgcggagataatataaaggaatttatacttttattaccctataataaatcactggagatgtatgaacttaacgatcaaaagatccagtatttgactgcccctaatatcaatatacataaaatgtcgctatcaaatataacaatagaaaagagcaacctttcatatgggtattattttagttgtgtattatccaatatatcatgttttgaaagcgacttatcaaacaccatcttttcaaatggagaaattaataatctcttcattaaaaaaagcaacatatttggagcatcattcactaataccagaataaaaaatttgctctgtgaagatattatgcctggtcgatggaccactcaacttgtcaataagcacttaggttacagatacacaggagtattcaaaaccctggcaagtattgatgacaaaccgtcccgtttcgaaattttgataccattggtacaaactttagttcgcgacaatgtaaagctaaataatgatgtgtataaagaactgaaaaagtttatgcacgattacgacaaaacatccccggaaatgagaaaataccttcagagcatcaacgagtctatgttccttatgaaaaacatagctcatcaaaattaaaaaatctcaaaaaagaagtaatttcagaatgaaattaactgtgatgattattaattcactacagaggaataaaaaataatctgaagcatactctgaaacatcctactctctcactctaataatggcaccttgctcttcttataaagaagggaataattaagaatattaaactttcatcaacttcacatcaagaaattaaaaaatttaaacattaatctaaataataacaacctgatcacataatcgggtacgattttatccgataactataatgctataactctgggaaatggttggaatacaccgctgggtgccatctctttttacgctgcccgatcgagtagtaagttaaataatgataccagacacgaaggtacgagctatcaggtcgcctataataaatatctagtacaaacagccactcgatttagcgtggccgcctggcgttatgcttcgcaggattacaggacattcagcgaccatctttacgaaaatgataaacactatcatcagagtgattataatgatttttatgatattggcagaaaaaatagcctttctgccaatattatgcaacctttatccaataatctgggaaatgtatcattaagtgcgctttggcggaattactgggggcgaagtggaaatgctaaagattaccaattcagttactccaataactggcaacacattagttatactttctctgccagccaatcttatgatgaaaataataaagaagaggagcgttttaatctgtttatctccattcctttctactggggggatgatattgccaaaacacgtcaccaaattaacttatcgaattcgacctcattttccaaagatggctattcctccaacaatactggaattactggcatagccggtgaacatgatcagttaaattatggtatatatgttaatcagcaacaacaaaataatgatacctcgcttggtacgaatttaagctggagaactcccatcgccataatagatggcagctatagtcattctaaaaacgcctggcaaagtggtggaagtattagtagtggattagttgtctggtccggtggtattaatatcactaaccagttatccgatacatttgcaattctggatgcgcctggattagaaggcgcgcatattaatggacaaaaatacaaccgaacaaacagcaaaggccaggttgtttacgacccgattatacctcatcgtgaaaaccatctggtacttgatatagcaaacagtgaaagtgaaacagaattgcagggcaatcgtcaaattattgcgccttaccgtggagcagtttcttatgtgcagtttacaactgaccaacgtaagccttggtatatacaggcactgcgtcccgatggttcgccattaacctttggctatgacgtactggatctccaggaaaacaatattggagtcgttggccagggtagtcgcctttttattcgcgtagatgaaattccaactggcataaaagttgctctcaatgatgaacagaatttattctgtactattacttttcaacacgttattgatgaaaacaaaacatatatatgccagtaaaaggagtttactatgaagtggcttttattaatcaccttgagtctatattcttttattgtgcaaagtgctccctgtgcattgaccaatgtcggtgaacaacgtggaacatatatactcaagccactgagtatgaaaggtaatctcaccgccgaaaaaattgaaaacaccggaaatatcattgagtgtacagacttgcaagagacaaccaacgccattaaagttcattttttaacacagaacgctttaaggtttaaagtcggaagtcgtcattatattattaatttcccctttgaatatgacggtaaaaaaatagagcttccagggaagtcatcttataatttagaagaaatgctatctgcgataaatttcaccattccatattctatcgcatctgtatcagatagttctaacaccgcagacatttttccaggaactccttttcctttgttgttcgaaattgaagtgagttcatgtacagggaataatactaattgtaatagcgtccgctttaattataatttaaatactattttacaggtaaatttaatgacctgtggttttgaagatcaatccatcgacactggacgatttgtactgtctcgtatcaataatgaaaattatcagtttcatcatataagatttgactgcatccagggcgagcaaggtgaattagtttttgaacccagtgatgttgaatattactttgaaccagtgacgatacaggagtcaggaaccagcatattaaaaaatgagttagaaaacagtgaggacggtgcgggtcaagtaggctttcaactctcgaatgatggtacgaatgaaatccagtatggtaaaagcaattactactcttttcagcatccccatgaaggaagtaatcagattcctctatttattcgcccgcgtacatatggaaataatgtctcaagcgggcaaataatgagccgagtcaaaatcgtggttatgtacaactaatctatctcctccactttaactttgggggagctgccgattaacgcgccgctggactaaaaagcgcagaataatccgtattgcagattcgctgtaccgccgggtgctgaatcatccgctcagcaaaaatagcatggtactcttccatcacattctcgacgcgaccaatttctacgacagttttatcggcataaaagtcatatgcataaagcgttggggcaacgaagattgcattgtgcattgcaccaaaagctttcatcaacgcggcatcatcaaactcgccgaggatttctacgtttaatccctgggagttaaaccagttaagcaatttgcgccctaacattgaacgtcgcccaggaatcaaaagtcgccgttcttccagacaagccgggaacggtttttctggtggtggatttgtacaccagaaactcacgccacattcgccaattctcacggagaacaggccttcctgctgcgtagagtctatcggacagtcggaaatgatcatatccagtttatgctggcttaattgctccagtagcatttcgtgggtggattcgaagcagcgaagatgaatcggctcgccttctaccactgcagcattcagcacgctactgaccaggcgtttggaaagtgcatcagccacgccaacgtcaaacaataaattggattctttgcgatagttcacaatatccagcatttcctggcttaaggtgaacattttatcggcatagcgatagaccagttctcccagctcgctgggttcgagaccacgtcccttgcgcttaaataatttgccttgcaggcgctcttccagagcccggatctgtccggtaatggtttgtggtgtcaaataaagcgcctccgctgcgccaaccacggaaccttctttatagacatgccagaagtaatacaagtggttgtaattgatatgagacatgctcatttctctccctgataacaatgaaaagggagccgtttatggctccccggtaaaccgtcctgtcaaactgatggacgcaaacgaacgcgtaaccaactgtatccaattaccgccgaagagatagaaccgaccaggataccgagtttcgcccagttaatcagttctggatctacgctaccaaaggccaggctggcaataaagatagacatagtaaaaccgataccgcacaggatccccaccgccataatttgctgataagtcgttccctcaggcagatgcgccagtttcaaacgcagcgccaaccagcagaacagactaatccccagcggtttgccaatcagcaagccagcgatgatccccaatggcagaatggaggtcaagccatccagcgtgacgccttgcagagaaacgccagcattagcgaatgcaaacagcggcaaaatcagatacgccacccacgggtgcaacacatgctccagtcgcttcgctggagaacgcccatgcttctctttcaaaggaataaagaagccgacaattacccccgccagagttgcgtgaacccccgatttcaacaccgcagtccacaacactacgccaaccagaatatagacgcccgtgcggcgtacaccacacagattcaataccgcgagtaccgcaattgctacagccgcgacgccaagagaggccatcgataagtcattagtgtagaacaatgcgatgataatgatggccccaagatcgtcgataatagccagagccatcaaaaagatcttcagcgctaacggaacacgacttcccaatagcgccagcacaccaagtgcaaaggcaatgtcagtagccgccgggatcgcccacccttcgcgggtaatcggatcggcatagttaaaagccagatagagtaatgccggcacaatcatcccaccaatagcggcgataactggaaatgcggcctggcgtaagctggctagcgatccttgcatcagttcacgtttaacttccagaccgactaacaggaaaaataccgccatcagcgcgtcatttatccataacagcatgtttttgttgatttcgagtgaaccaacccggagctgaaccggcgtctccagaaagtcgtgataccatccactggttgcgccgctgttggccatcatcatcgccaggatagcggcaatgataagaataatgcctcccgaggcatcactgctaaagaatcgatgcagatgtttcactttttatttctctttcaggtgaatagatcgtttttactattttaccccgcacgaatcatcgttaaaatcagattatagtgtaggaataattcgttttttacgagccattgaagaatttgcgccatcagcggtgagatgcgtttttgacggctgtaagcgctgacgagtgaccctaagccctgataatcatagcttaaggtgaggatttctgagggattaattaggaaaagtaataattaatttgttgtcagtcggcgatgtttgttaggccaatatttcaaaaataatccagcttgtcgtcaataattgcgatgaagagataaattaaagttaaataattaaatcattaaaaaattacgccatcaaaatgcgaggcgtcttcaggattagaatcgataaaacagaatgagttaaagagagcgatataatagcggcgggtgcttgaggctatctgtctcaggcattagctgaacggcagatagagaaaagccccgagtgatattttactatcaacccgaggccccctatatgcagaacacatgtagagtgcctcttactgaccgtaaggtcaaggagaagagagcaatgaagcagcataaggcgatgattgtcgccctgatcgtcatctgtatcaccgccgtagtggcggcgctggtaacgagaaaagacctctgtgaggttcacatccgaactggccagacggaggttgctgttttcacggcttacgaatccgagtaagagcaacggcggggagtgatcccataagcgctaacttaagggttgtggtattacgcctgatatgatttaacgtgcgtagcgcggtggtcccacctgaccccatgccgaactcagaagtgaaacgccgtagcgccgatggtagtgtggggtctccccatgcgagagtagggaactgccaggcatcaaattatgcgaaaggccatcctgacggatggcctttttgcattggcgcagaaaaaaatgcctgatgcgacgctgcgcgtcttatactcccacatatgccagattcagcaacggatacggcttccccaacttgcccacttccatacgtgtcctccttaccagaaatttatccttaagctcctcaataaccattttcctgctaactaaattcatggttaaggttgcataatgatatgcaacaaatgtataacatttcctttaccaaaaaaaataaacaaaagcgaccgacaaaagcatcggattacggcaggagacataatggcatggctgaaagtactgtaacggcagacagcaaactgacaagtagtgatactcgtcgccgcatttgggcgattgtgggggcctcttcaggtaatctggtcgagtggttcgatttctatgtctactcgttctgttcactctactttgcccacatcttcttcccttccgggaacacgacgactcaactactacaaacagcaggtgtttttgctgcgggattcctgatgcgcccaataggcggttggctatttggccgcatagccgataaacatggtcgcaaaaaatcgatgctgttatcggtgtgtatgatgtgtttcggatcgctggttatcgcctgcctcccaggttatgaaactataggtacgtgggctccggcattattgcttctcgctcgtttatttcagggattatctgttggcggagaatatggcaccagcgccacctatatgagtgaagttgccgttgaagggcgcaaaggtttttacgcatcatttcagtatgtgacgttgatcggcggacaactgctagccctactggttgtcgtggttttacaacacaccatggaagacgctgcactcagagagtggggatggcgtattcctttcgcgttaggagctgtgttagctgttgtggcgttgtggttacgtcgtcagttagatgaaacttcgcaacaagaaacgcgcgctttaaaagaagctggatctctgaaaggattatggcgcaatcgccgtgcattcatcatggttctcggttttaccgctgcgggctccctttgtttctataccttcactacttatatgcagaagtatctggtaaatactgcgggaatgcatgccaacgtggcgagtggcattatgactgccgcattgtttgtattcatgcttattcaaccactcattggcgcgctgtcggataagattggtcgccgtacctcaatgttatgtttcggttcgctggcagccatttttaccgttcctattctctcagcattgcaaaacgtttcctcgccttatgccgcttttggtctggtgatgtgtgccctgctgatagtgagtttttatacatcaatcagtggaatactgaaggctgagatgttcccggcacaggttcgcgcattaggcgttggtctgtcatatgcggtcgctaatgctatatttggtggttcggcggagtacgtagcgttgtcgctgaaatcaataggaatggaaacagccttcttctggtatgtgaccttgatggccgtggtggcgtttctggtttctttgatgctacatcgcaaagggaaggggatgcgtctttagtgacgggtcagttgccagacggtatagccggtgcttgcaccggcgacatcccaggccaaatccttccagctccagccgctcccttcggggcggctatcccaaagctcttttgacgcccccaaactgacagagaacatcaatccaaacatggcactgcgatcccggctcatcccctgatgctgtgaatattcatttccggcggcggaaagcatcgccgaggcgataaagtgttgagctttatcctgcccgctccagctatcgttagccatatggctgcatccagaaagtaacaatagcgaacagacaaaaagaatacgcaaaacgtggcctccaaaaaacaaaccccgtacaggacggggttgtgattacaggatgcggctaattaatcggtcgatgcggatacggcgcaaacggcggatgagtttacgaaccttcaccggataatcggcaatactttgcagatcgcgatagtgcttaacgatggtggtatgctcgcggatcagctccagttctttctctcgctgtggcgccagctcaagttgcggatcgtggatcaaaatggcgttttccagatccagacgccaggcgcgcgggttcaggttattaccggtgatcaacatccacttatcatcaacccacatccctttcaggtgataggtgttgtcgtcatctttccataaccgaaccactagctggtcagtattgacgtaatactgcaaacggctcaggaaacgacgcagattgatctcatagagataaggcaatgcgccaattatcttgaaaggttcatcttccggaatgtagaagtcattcgcggttttatcaccaacaataatttcgacctttttcccttcgcgcagcaactggataatattgcgcacaaggattgctggcaggttgaagtatggcgtacagatggttagtttctgctcggcacaaggcataagatggaaaatggtcttgttcaacagactcgatttccccagccccactagcggcgttacagaaagctgatcgttgtcggcatcgccctggaaatgataagcggcatcacgcagctcctggcggaacagacgaatatcgttcttgatttccgggctttttggccgattaacatcatccagacgattaacgccgcggccattcataatattctgtgtaacccattcaaacataatgtctgacatcttacggttacggatcagatgataacggtcgtagcgatatttatcgtgctgatgcaggtaaacatcgttcaggctggcaccgctataaagtacgctatcgtcgatgataaagcctttaaagtgcagaacaccaagggcttcacgagtattgattggaacgccataaaccggaacatctacgcccggattttcctgcgccatgcggcagtaccagtcagcgttagtgttagatgccgcagcgccaatgcgtccacgttgtgcacgatgccagtcgaccagcacccgcacatccagttccggacgctgccttttagcctcatacaacgcgttcagaatgcctttgccaccgtcatcctgttcgagatacagggcgacaatgcaaatgcgctgcttcgcgctggctattttttccagcagcgtctcccggaagtcggcgggagcgtaaaagaaatcgacatcatcaactgattgagaaatcttgggtagttgggcaaggtgttgttgatgtttattacgcttaaattttgacaacatcacagtgcatttcttctctgttcattgaagggtcctctgtgcaatgcagacgacataagcgggcaataataacaccagtcccgattaagtggtcaacatttccagtaccttactcatgattcctcgcgctgggcaagatttagcgtaagcccaacgatcccctcttcgagctggatatcaacgttaaacccgagcttgcgggctagcgccaccatgccacgattgtttggcatcgtaataccattcagacgttgtagtccgtgatctcgcgtataggtaatcaacttttccattaagcgtcgacctaagcctaaccctttgagatccgagcgaaccagtacagcaaattcggcatcgatgttatcaggatcggaaatcgcacgcgtgacgccgaggatctcttccgtttgatcaatacgtcgtaccgctacaaacgccatttcccgatcgtagtcgatctgtgtcatgttggctaaatcttcatgggtaaattcgttgatctcgctaaagtagcggtaataaagatcttctttggtgactcgcgaaatgaattgctgaagttgtggctcatcttctggcaaaatcgggcggaacaagcagcgttcaccgtttttcaattctacccattcttccagctgatgcggataagggcgcactgccagccgactctcgttatcgccttcaaacggcgagatatccagcgtgacatccagcgcggtaaattcactgccagaagccagcaaaggatgaatatccagacgctgaatttccgggcaatcgacaatcaagttggaaacctgcaccagaagctggctcaagcctgcaacatccaatgggcgtagcgcactgcgcgcacgaatctttttacttttgatcccctgaataaccagatagcgggccaggttcatgttcagcggcggcagtgcgacgacggcttgatcttcaggacgccactccacaccgccttcacccagcatgatcaacggcccgaaaaccggatcgtgctcaaccacaacccgcaactcctgagcgccagcacggttagccatactttgcaccaacaggccgtggacccgcgcctgtggccaggccatttttacgcgatcgaaaatagcgttcgccgcttgctggacttcattggctgtacgcaggtaaagcatgacgccctgaacttccgatttatgtggaatatccggcgaacgcaatttcagcgccaccggataaccaatctgttcggcaatatgcaccgcttcggtgctatcgctggcaatccaggtagggagcgtgttcatgccatacgcttgcaggatgggctgaacttcatgggtatcgagcgacgtagccccttcggcaatcgcctgttgcaacagaagatgcgcttctgcggtattggaagtcagattgctgggcaacgccggcgtttcgcgtagttgcttctgattacgccggtactccaccatatgcataaaagcagtgatggttccttccggggtacggtaggtcggcagcccggcttcgctgaataaacgtcgtgcctcttgcgaggagtgctcgccgcaccagttcgtcagcaaagagacatatttgctgcggggatgatgctttaccgcttcaattaatacttgcgcgctttctgttgcgggagcagcggcgctgggcgaatgaataaccatcagcgcgtcaaaatcctggctgtggagcagaatatccagcgttttaatatagtgctcactgctggcgtcatcgcgtagatcgagcgggttagatattgccacatgttctggcagtgcatcgcgcagtttctggcaggtttcttcgcttagcgttgccagcttgccattgcgtgaccataaggcatccagcgccagcgcggcaggcgcagcaccgttgctgataatcatcagccggtcgccacgtagcgggcgcatatggctaagggtttccaccgccgaaaacagctcgtgggtgtcctgtacccgcaacaaaccggcacgctgaatagccgcatcccatgccgggtccattcctgccgtcgtgttgagcagtcgctgtgccgccgggctacgtccgcttttaatcaccagaatcggtttattacgcgaggcactacgggccgccgaaacaaagcgtcgcgcgtcgcttaactgttcgagatagagcaggatggcgctggttttactgtcgcgtgccagatagtcaagcaattcatcaacgtcgatatccaggctgtcgccgagcgcaataaagtaggaaaagcccatcttacgctgttgcgcccagtcgaggatggtgttggagacggcagccgattgcgaaataaacgccagcttgccgcgtttaatcggcacaggcgaaaagctggcattcagaccttgccagggagccagtaaacccagactgtttggtccaagcaggcgcatgttatggcgcagggcgcaggcgcggagatcttcgtgttgcgatgccggggcggaaagaataatgcaggttttacagcctttctcgccgagctcttccagaagagcaagattacggctggcattggtacataaaaccgcaaggtcgggtgtaaagggcaagctggcaatatccggccaggccaacacacccaacaccgctttccaggctggcgtcaccgggagtaccggtccgttaaagcctcccgccagcaggttacgcatcatcaggtaacctgcgcgattgggtttcatcgacgcgccaattaccgctatcgattttggtcgcagtagtgcttccagtcctcgctgactcataccggtctcccgcagaagtgaccgaatgattttaaacgctttctaactgttctgctgtgatgctacccagatgttgcgtttttcctgccagatagcgtgttttaaagcgggtaaaatgctcgcctaaccctgccgccgccccggtatcgccggccatatctaacagtgcgatggctacctcggcagtacaatattggccttcagcctgggcttcacgcaggcgataggcagaaagccgggaaagatcgacggaaatgacgggaagattatccagatacggacttttacgaaacatcttgcgagcttccggccaggtaccatcgagcatgataaacagcggtggcttaccggcaggtggtgtgaagatcacttcccgttgctcatcagcatacgaagcgggaaagaccaccattggctgatagtccgggttttgcaccaactccagcaaatcctgcgagggttcggtacgcgaccattgaaacgcaacggtatcaggcaaaatatcagcaatgagacgcccggtattactgggcttcattggctcggtgtcgaacatcagcaaacagaagcgactttttgcttgtgctggggtaattgtcgaacagagacataatttctctggcaaaagacagcgttggcagcgacgaacgcgattaccgcgggcaagaaaaggacgtgttgcgcgcgcaatacgctcggcgcgtaactggagaacagcgttttcggtcataagagagcgtcgaaaaaacgccattgtcgcagaggagaaaacggggcacaagatgcgccccggtaagattaaagagattcgttcagccagctatcgaacggcgctttcggtactgcgccattaagcatgtcgacaacctgaccgtttttgaaaatcatgatcgtcggtatactacgaattccaaagcgactgctcaattcacgttcagcttcggtattcactttcacaaagcgcactttaccgctacgctcttgcgcgacatcttcaaaaattggtgcgaaattacggcaggggccgcaccacggtgcccagaagtcgatcaccacaggtagatcatccttcagcaatttgtcgagtgtttcaccggtcgcattaatcacctctccgtcaaacaagtcgtgaccgcagcgtccgcattttgccgcatcttcgatccgatcgtcgggaatgcgattgatggcctgacaatgggtacaaacggtattcataactaacctcgggatgagtaaggagacttatcggcaacgacgccggtatgtttctaatatgttacatattatcggggacattgttccagacaacaatctgttttattcaataggtatgatagtcgcaggctttggtacgaaatcatggcgaaccgcgcggacttcgggtaatctgcgcgcttcgcgcagcgctggtggagaaaagcatgaacgatgaaatgaaaggtaaaagcggcaaggtcaaagtgatgtatgtccgcagtgatgatgattctgataaacgtacccacaacccgcgtaccgggaaagggggcgggcgtccaggaaaatctcgtgctgacggtggccgtcgccccgcccgcgatgacaaacagagtcagccccgtgaccgcaagtgggaagattcgccgtggcgcacggtttcccgcgcgccgggtgatgagacgccggaaaaggccgatcacggtggcatcagtggtaaaagttttattgatccggaagtgttgcgtcgtcagcgtgcggaagaaacccgcgtctacggcgaaaatgcatgtcaggcacttttccagagccgtccggaagcgattgttcgcgcctggtttatccagagtgtaacgccgcgttttaaagaagctttgcgctggatggcagcaaaccgcaaagcgtaccatgtggtggatgaagcggaattgacaaaagcgtcaggcacggaacatcacggcggcgtttgcttcttgatcaaaaagcgtaacggtacaaccgtgcagcagtgggtaagccaggcaggcgcgcaggattgcgttctggcactggaaaacgaatctaacccgcataacctgggtggcatgatgcgcagctgcgcgcacttcggcgtgaaaggtgtcgtggtgcaggatgcggcactgctggagtcgggggcggctatccgtaccgcagaaggcggcgcagagcacgttcagccgattactggcgacaacattgttaacgtgctggatgatttccgtcaggcaggttacaccgtagtgaccacttccagcgagcagggtaaaccgctgttcaaaactagtctgccagcgaaaatggtactggtgctgggtcaggaatatgaagggttaccggatgccgcacgcgatccgaacgatctgcgcgtgaagattgacggtacgggcaacgttgccgggctgaatatctctgtcgcaaccggcgttttgcttggtgaatggtggcgtcagaataaagcctgataaatcagccgggtggcaactctgccatccggcatttccccgcaaatttactcactctctgccggtaatactggcatccagtcaatcggcgtctcgccacgttgttccagccactgatttgccagcacaaaatggttgcagccaaagaatccacgatgcgccgaaagcggcgacggatgcggtgctttcagtacatgatggcgttgcttatctataatcgcccctttcttttgcgcatgcgatccccacaacaaaaacaccacgccttcgcgatgctggttaatcaggctgatcactttatcggtgaaggtttcccagccgaggctggcgtgggaatgcgcctgacctgcgcgtaccgtcaacacagtattgagtagcagaacgccctgacgcgcccagctttcaagataaccatgattagggcgggtgaagcccggaatagtattttccagctctttatacatattcaataatgacggaggaatggcaatgccgggacgaacggaaaatgccagaccatgcgcctgtcccggtccgtgataaggatcctggccgagaatcaccactttaacgtcacccaactctgtaaagcggaacgcgttaaagacatctttttgtggtgggtagatagtgacgccggactgccgctcgctggcgacggtctgaagggtattaagaaaatagggttgctgcttctcttcagccagcacgtcatgccaggttaattcgttagccatctcgctctcctgcgaatcttcaatccgcctagcttaactgcttctttctacagaacaaaatcatgctcattttttagacttaaacgagtgcaaaaaaatgtaaattggtaaaatttcacacccgcataagttgatgtaaaacaataaaatccatttgcgaccatacttgatgtgtggtttttattgatttaaatcaaagattcaagggtgtttgaggagtatatatacactcaagcaacaatggttttaccaattggccgcgacaggctgaacaaatcaaataattttgccggggaggcatcacatgattacaggtatccagattactaaagccgctaacgacgatctgctgaactctttctggctgctggacagcgaaaaaggcgaagcgcgttgcatcgttgcaaaagcaggttatgcagaagatgaagtggttgcagtaagcaaactgggtgacattgaataccgtgaagttccagtagaagtgaaaccagaagttcgcgttgaaggtggtcaacacctgaacgttaacgttctgcgtcgcgaaactctggaagatgcagttaagcatccggaaaaatatccgcagctgaccatccgtgtatccggttatgcagttcgctttaactctctgactccggaacagcagcgcgacgttatcgctcgtacctttactgaaagcctgtaaggcttaagtagcaagttactaagcggaagagggcgacctcttccgctttttttcgttaatagaaaatgcgtaccgcgcaatagaccagcaacagggcaagcacgatatttaactggcgaccatactggcgaaacaatcgctgaaacagatgccccgccagcgcccagcacacattgccaaacgtcccaatcatcgccagcaaaacgctgacgccaactacccagcttaacgcctgtgtttgcggcagaacaaacgtcgacagtgccgtaacaccgtacaaaatgattttgacgttcacaaactgcaaagcaaagctggcccaaaagctgattggttttgcctgaagtccgtcttcctttgttgggctggtggcgattttccacgccagccagacaatatatgccgcccccgcccaactcaaaaggtgtaccgctgccgggtcaatcactgccagtgaaaatgaaatgcccgcacacagtaacatcacaatcaaaaatcccagactcatccctgccagcacgcgggtactttgacgaaatccatgcgacgtagcagagctaagggcgagaatattgttcggtcctggcgtcatagcggtaatcagggtgtaagtccaaaaagcacttaaaagggtcggtgtcacttgttatctcctctgttttggtagacagtacccgacacggaacatttaaaaaaatgaatgtttttatattctagattcgatatttttgataggtttggggttatggatctgcgccgttttattacgcttaaaaccgtggtggaagagggttcctttttgcgagcttcgcaaaaattgtgctgtacacaatcgacggtgacttttcatattcagcagcttgagcaggagttttcagtccagttatttgagaaaattggccgacggatgtgccttacccgcgaaggaaaaaagttgctgccgcacatttatgaacttacccgagtgatggatacgcttcgtgaggctgccaaaaaggagtcagatccggacggggaactacgcgttgtttcgggcgaaacgttgctctcttaccgaatgccgcaggtgttgcagcgttttcggcaacgcgccccaaaagtgcgtttatcgttgcagtcgctgaactgttacgtgatccgtgatgcgctactgaatgatgaggccgatgttggcgtcttttatcgtgtagggaatgatgatgctctgaatcgacgagagttgggtgaacaatcactggtgctggtggcttcaccgcaaattgcagatgtcgattttactgagccgggaagacataacgcctgtagctttattatcaacgaaccgcaatgtgtcttccggcagatatttgagagcacgctgcgtcagcggcggatcacggtggaaaacaccattgagcttataagtatcgaaagcatcaagcgttgtgtcgcggcgaatatcggggtcagctacctaccgcgctttgcggtggcaaaagagttggagtgcggagaattaattgaattgccttttggcgaacagtcgcagaccattacggccatgtgcgcacatcatgctggaaaagcggttagcccggcgatgcacacttttattcagtgtgttgaagagagttttgtggctggataaaaataatgtcgggattaaacccggcatttaacttgtcgacaaagtgcgctttattcatgccggatgcggcgtgaacgccttatccggcctacaagatcgtgcaaattcaatatattgcatgagccacgtaggcctgataagcgtagcgcatcaggcagttttgcgtttgccagcacttttaataccaggcttaaacctggcattgagattactcttctgtcgtttgcggtggcacgcccgttccgcttggtttacggcgcttaccaatatttttggtgtcgcgatggcgttttttcacccgcggcttctctttctctttagcttttttcttctcagcacgtttagccagtactttcttcgatggcttgccggtctgcttttcgcttggcgcacgcgttttcgggcgtaactcatcaataacgcgagctttaattggctcttcaatatagcggcctactttacccagcagcagatggtcatgggcttccaccagcgaaattgcggtgcctttacgaccggcgcgcgcggtacgtccgatacggtgcaaataagtatcgccactgcgcggcatatcgaagttaaagacgtggctgacgtcaggaatgtcgataccgcgcgcggcaacatcggttgcgaccagtacgtttacgcgaccttcggtcaaacgcttgatcgcttcgttacgcttgccctgtaccatctcaccttcgagatagcagttgttgatgcccgcttcgcgcagccagtttgccagctcatgcacacgctcacgcttacgcacaaacacaattgagcgggtcgcttccggctgttttaacagatgcaccagcaacgcggttttatgctcaagatcatcggcgcggtaataccactgatgaatttttttgcgctcacgggtggagggattggcagaaacttccaccggatcttccagcagacgctcggcaaagtcctgaatcgcatcgccttccagcgttgccgaaaagagcagggtctgtttacgccagcgcgtttcgccagcaatatgttcgatatcctgagcgaagcccatatccagcatacggtctgcttcgtcgaggatcagcgtttcaaccgcgcggcaatcgaagttctcttcttttatgtattgcagcagacgtccggtcgtggcgaccacgatgtcctgattttcgctgaacacttccgcgtggttcatataggctacgccgccggtgatggtggcgatatccagatgcgtatgtttcgccagttcgcgggcatgatcggccacctgcatcgccagctcgcgagttggggtgaggatcaaaatacgcggcggaccggatttcttacgcgggaaatcgagcaggtgctgcaacgctggcagcagatacgccgccgttttaccggtgcctgtcggcgcagaaccgagtacatcacggccatcgagcgcaggcggaatggcggcagcctgaatggcggtcgggcgagtgaaacctttatcctggagggcttccagcaggctttcgtcgagttcaagttcggaaaaagtcgttacagtcatgttctacctctgtgtggggcgctgattatagacgttacggctgcaatcttcatctgtttgtatggatatcgcttctcgggtattgttctcacccggtgctatcgccgtttttcctgcaaggttttattttcatgtcacagtctacatccgtgcttcgtcgtaatggatttacttttaaacagttttttgttgctcacgatcgctgtgcgatgaaagtgggaacggatggtattttattgggcgcatgggcaccggtggctggggtaaaacgttgccttgatatcggcgcgggtagcgggttgctggcattaatgctggcgcagcgaaccgatgacagcgtgatgattgatgcagttgaactggaaagtgaagctgccgcgcaggcgcaggaaaatatcaaccagtccccgtgggcagagcggattaacgtccatacggcggatattcagcagtggatcacacagcagacagtacgcttcgatttaatcatcagtaacccaccttactatcagcagggagtagagtgctcgacacctcaacgggaacaggctcgctataccactacgcttgatcacccatcgttgctgacctgtgcggcggagtgcattaccgaagagggatttttctgcgtagtgctgccagagcagattggtaatggttttacggagctggcattaagcatgggctggcatttacgtttgcggacggatgtggcggaaaacgaagcgcgactgccgcatcgggtgctgctggcattctccccgcaggcgggagaatgctttagcgatcgcttagtcattcgtgggccagaccagaactattccgaagcgtatacggcgctgacccaggctttttatctgtttatgtaatgattgccgggggaaaggatcgacggaccggaatgggtgagcagttccggataatccagcgtgaaatgcaacccccgactctctttacgcatcattgcacagcgaacaatcaactcggcaacctgtaccagattacgcagctccagcaaattatttgagacgcggaaatgggcgtaatattcgtctatttcttgttggagcatggttatccgccgcagggcgcgttccaggcgcttcgttgtgcgcacaatgccaacgtaatcccacataaacagacgtagctcgtgccagttatgctgaattactacccgttcgtcagggttctcaacgcggctttcatcccacggcggtaacgtactgatgtcgtgggcataaggcatacgtctggtgatatcttccgccgccgaccagccatagaccagacactccagcaatgaattcgaggccatgcggttagcgccgtgtaagccggtataactcacctcgccaatggcatacaagccctcgacgtccgtacgcccatgatcatcaaccattacaccaccgcaggtataatgtgcagcaggcacaatcggtaccggttcttgtgtgagatcaatccccagcccgagcagcttttcataaatcatcgggaaatgctggcgaataaaatcggcgggcttatggctgatatcaaggaacatacaatctgcgccgaggcgtttcatttcatggtcaatggcgcgggcgacaatatcgcgcggggccagttcgccgcgctcatcaaaatcgggcataaaacgcgtaccatccgggcgcttgagataagcgccttcgccgcgcagtgcttctgttaacaggaaattgcgtgcctgtgggtgatatagcgcggtagggtggaactgattaaattcgagattggcaacccggcagcctgcgcgccacgccatagcaatgccatcgccagaagaaatatccggattggtggtgtactgataaaccttcgacgcaccgccggttgccagcaccaccgcttttgcgtggcaggtttccaccgtttctttattacggttccatacccacgcgccaacaacccgtcgcgtgcccggcaggccaattttgtcagaaacaatcagatcaaccgcgttgctgcgctccagcacgcgaatattcggatggttcagcgccttgctcaccagcgtggtttctacttctctaccggtggcgtcggcggcatgaagaatacgacggtgactatgtccaccttcacgggtcagatggtaactttcttcgccattcggttgaatgtgggtatcaaacaacaccccctggtcgattagccattgcacacaggatcgtgcattgctggcgacaaattcaactgcatggcgatcgcaaataccagccccggcaatcaatgtgtcttccacatgcgagtcaatgctgtcagtttcatcaaacacggcggcaataccgccctgggcataaaatgttgaaccttccgttaccgggcctttacttagaacgatgacctgatgctggtcagccaggcgtagcgccagtgaaagtccggctgcgccgctaccgataatcaacacgtcacatgaatgttcagggagagtattcattttctttgtttaatttactaaacatggtttggtcagcatagcatcatgttgtgcggataaacacctgctattttaatatttgttacagttgctaaacacgctgacgcagggcggcgagaaaaagagaagttactggctggtggaggattaggtggtgaaataaaaaggccgttgggttactcttcaggcagttaaatgggcatttctacacagataatgcgatgttcagattctgtagacttataatgatagataatgatccgtctacagcatgacaaacaaaaacagatgcgttacggaactttacaaaaacgagacactctaaccctttgcttgctcaaattgcagctaatggagtggcgtttcgatagcgcgtggaaatttggtttggggagactttacctcggatgagcgagcagttaacggaccaggtcctggttgaacgggtccagaagggagatcagaaagcctttaacttactggtagtgcgctatcagcataaagtggcgagtctggtttcccgctatgtgccgtcgggtgatgttcccgatgtggtacaagaagcttttattaaagcctatcgtgcgctggattcgttccggggagatagcgctttttatacatggctgtatcggattgctgtaaatacagcgaaaaattacctggttgctcaggggcgtcgtccaccttccagtgatgtggatgccattgaagctgaaaacttcgaaagtggcggcgcgttgaaagaaatttcgaaccctgagaacttaatgttgtcagaagaactgagacagatagttttccgaactattgagtccctcccggaagatttacgcatggcaataaccttgcgggagctggatggcctgagctatgaagagatagccgctatcatggattgtccggtaggtacggtgcgttcacgtatcttccgagcgagggaagctattgataacaaagttcaaccgcttatcaggcgttgacgatagcgggatactggataagggtattaggcatgcagaaagaacaactttccgctttaatggatggcgaaacgctggatagtgagctgcttaacgaactggctcataacccagaaatgcagaaaacctgggaaagctatcacttaatccgtgactcaatgcggggtgatactcccgaggtgctccatttcgatatctcttcacgcgtgatggccgccattgaagaagagccagtacgtcaaccggcgacattgatcccggaagcccagcctgcgccgcatcaatggcagaaaatgccattctggcagaaagtacgtccgtgggcggcacagcttacccaaatgggcgtagccgcatgcgtatcgcttgcagttatcgttggcgtccagcactataatggacaatctgaaacgtcccagcagcccgaaacgccggtatttaatacactgccgatgatgggtaaagccagcccggtaagcctgggagtaccttctgaagcgaccgcaaacaatggtcaacagcagcaggtacaggagcagcgtcgtcgcattaatgcaatgttgcaggattacgaactgcaacgccgactccactctgaacagcttcagtttgagcaggcgcaaacccagcaagccgctgtacaggtgccaggaattcaaactttaggaacgcaatcgcagtaatgaagcaactttggtttgccatgtcattagtgacaggtagcctgttattctctgctaacgcctcggccactcccgcgtccggggcgttattacagcagatgaacctggccagtcagtcactgaattacgagctgtcattcatcagcatcaataaacagggtgttgagtctctgcgttatcgacatgcacgcctcgataaccgtcctcttgcacaattgttgcaaatggatggcccgcgccgggaagtggtacagcgcggcaatgaaatcagctattttgaaccgggacttgaaccgttcacgcttaatggcgattacattgttgattctctgccatcgcttatctataccgatttcaaacgcctttctccttactacgactttatctccgtcgggcgcacgcgtattgctgatcgtctttgcgaagtcattcgcgtggttgcccgagatggtacacgctacagctacatcgtgtggatggacaccgaatcgaaattaccgatgcgggttgatctccttgatcgcgatggtgaaacgctggaacaatttcgcgtgattgcttttaacgtcaatcaggatatcagcagcagtatgcagacgctggcgaaggcaaatttgccgccgttgctttctgttcctgtaggtgaaaaagctaaattcagctggacgccaacctggttgccacagggttttagcgaagtttccagtagtcgacgtccgctaccgacgatggacaacatgcctatcgaatcacgtctctattccgacggattattcagcttctcggtaaacgttaaccgcgctacgccatcgagcaccgatcagatgttgcgcaccggacgcagaaccgtcagtacaagcgtacgtgataacgccgaaatcaccattgtcggtgaactgccgccgcaaacggcgaaacgcattgccgagaatattaagttcggggcagcgcaatgatcaaagagtgggctaccgtcgtctcctggcaaaacgggcaggcgctggtcagttgtgatgttaaagcttcatgcagcagctgcgcttcacgcgcctgttgcggtagccgcgtgttaaataaacttggcccgcaaaccacgcataccattgtcgtaccctgtgatgagccgttagtgccggggcaaaaagtggaattggggatcgccgaaggcagcctgcttagctccgcattactggtttatatgtcgccgctggtgggattattccttatcgcttcgctatttcagctactctttgcttctgacgtcgcagcattatgtggtgcgatcctcggtggtattggcgggttcctgattgcgcgcggctactcgcgtaagtttgctgcccgggcagaatggcaaccgatcatcttaagcgtggcattgccgcctggccttgtgcgatttgaaacatcttcggaagacgcgagccagtgatttcactggctttgttgcattttgcataacaaatgcgaggacgtttccagataccacaatccatacggtatgaacatttcctcgcctcaatgttgtagtgtagaatgcggcgtttctattaatacagacgttaagctcagaacagcgacttctaaaagcctggttaaccgggcattaaggcacaataatcatactttatgaagaatatacgtaacttttcgatcatagctcacattgaccacggtaaatcgacgctgtctgaccgtattatccagatctgcggtggcctgtctgaccgtgaaatggaggcgcaggttctcgattccatggatcttgagcgtgagcgtggcattaccatcaaagcgcaaagcgtgacgctggactacaaagcgtctgacggcgaaacctatcagcttaactttatcgacaccccgggccacgtagacttctcctatgaagtttcccgttcgctggctgcctgtgaaggtgcattgctggtggtcgacgccgggcagggcgtagaagcgcaaaccctggcaaactgctacaccgccatggaaatggatctcgaagttgtgccggtactgaacaagattgacctgccggcagccgatcctgaacgcgtggcggaagaaattgaagatatcgtcggcatcgacgccaccgacgcggtgcgctgttcagcgaaaaccggcgttggtgtgcaggacgttctcgaacgtctggtgcgcgacattccgccgccggaaggcgatccggaaggcccgttgcaggcactaattatcgactcatggttcgacaactacctgggcgttgtttcacttatccgtattaaaaacggcaccctgcgtaagggcgacaaagtgaaagtcatgagtaccgggcagacctataacgccgaccgtctgggcatcttcacgccgaaacaggttgaccgcactgaactgaaatgtggcgaagtaggctggctcgtatgtgcgattaaagatatccacggcgctccagtcggcgataccttaacgctggcgcgtaatccggcagaaaaggcgctgcctggctttaagaaagtcaaaccgcaggtatacgccggtctgttcccggtaagttccgacgactatgaagccttccgtgacgcgctgggtaaactcagcctgaacgatgcctcactgttctatgagccggaaagctccagcgcgctgggctttggtttccgctgcggcttcctcggcctgctgcacatggagatcatccaggaacgtctggaacgtgaatacgatctggatctgatcaccactgcgccgaccgtagtgtatgaagttgaaaccacgtcaagagaagttatctacgtcgacagcccatccaagctgcctgcggtaaataacatctacgaactgcgcgagccgattgcagagtgtcacatgctgctgccgcaggcatatctcggcaacgttattacgttgtgcgtagaaaaacgcggcgtgcagaccaatatggtttaccacggtaatcaggtggcgctgacgtacgagatcccgatggcggaagtggtgctcgacttcttcgatcgcctgaaatctacctcgcgtggttatgcgtctctggattacaacttcaagcgcttccaggcgtccgacatggtacgtgtagacgtattaatcaacggtgaacgtgttgatgcgctggcgttgatcacccaccgtgataattcgcaaaaccgcggtcgcgagttggtggagaagatgaaagatctgatcccacgccagcagtttgatatcgccattcaggcagcgattggtacgcacatcattgcgcgatccaccgtgaaacagctgcgtaaaaacgtactggctaaatgttatggcggcgatatcagccgtaagaaaaagctgctgcagaagcagaaagaaggtaagaaacgcatgaagcagatcggtaacgtcgagctgccgcaggaagcgttcctcgccattctgcacgtcggcaaagacaacaaataacccttaggagttggcatggcgaatatgtttgccctgattctggtgattgccacactggtgacgggcattttatggtgcgtggataaattctttttcgcacctaaacggcgggaacgtcaggcagcggcgcaggcggctgccggggactcactggataaagcaacgttgaaaaaggttgcgccgaagcctggctggctggaaaccggtgcttctgtttttccggtactggctatcgtattgattgtgcgttcgtttatttatgaaccgttccagatcccgtcaggttcgatgatgccgactctgttaattggtgattttattctggtagagaagtttgcttatggcattaaagatcctatctaccagaaaacgctgatcgaaaccggtcatccgaaacgcggcgatatcgtggtctttaaatatccggaagatccaaagcttgattacatcaagcgcgcggtgggtttaccgggcgataaagtcacttacgatccggtctcaaaagagctgacgattcaaccgggatgcagttccggccaggcgtgtgaaaacgcgctgccggtcacctactcaaacgtggaaccgagcgatttcgttcagaccttctcacgccgtaatggtggggaagcgaccagcggattctttgaagtgccgaaaaacgaaaccaaagaaaatggaattcgtctttccgagcgtaaagagacactgggtgatgtgacgcaccgcattctgacagtgccgattgcgcaggatcaggtggggatgtattaccagcagccagggcaacaactggcaacctggattgttcctccgggacaatacttcatgatgggcgacaaccgcgacaacagcgcggacagccgttactggggctttgtgccggaagcgaatctggtcggtcgggcaacggctatctggatgagcttcgataagcaagaaggcgaatggccgactggtctgcgcttaagtcgcattggcggcatccattaatagccatcttcgttcacgttgtcgccgttatggcgacaacgtgaattatttatgagataaatctcccgtggctaacgacatcccccgtcgttgtgtatagaatattcccccgaagtttaaggttggcacctccaggttgccacggcacacgaaacagcgttggtccccatataccggtaaactgaaactgcagcgaagcagttagcagaaccatgtatatcaggtctgtttcgtgtgctgaattgttgacgcatttatttattggtatcgcatgaaccccatcgtaattaatcggcttcaacggaagctgggctacacttttaatcatcaggaactgttgcagcaggcattaactcatcgtagtgccagcagtaaacataacgagcgtttagaatttttaggcgactctattctgagctacgttatcgccaatgcgctttatcaccgtttccctcgtgtggatgaaggcgatatgagccggatgcgcgccacgctggtccgtggcaatacgctggcggaactggcgcgcgaatttgagttaggcgagtgcttacgtttagggccaggtgaacttaaaagcggtggatttcgtcgtgagtcaattctcgccgacaccgtcgaagcattaattggtggcgtattcctcgacagtgatattcaaaccgtcgagaaattaatcctcaactggtatcaaactcgtttggacgaaattagcccaggcgataaacaaaaagatccgaaaacgcgcttgcaagaatatttgcagggtcgccatctgccgctgccgacttatctggtagtccaggtacgtggcgaagcgcacgatcaggaatttactatccactgccaggtcagcggcctgagtgaaccggtggttggcacaggttcaagccgtcgtaaggctgagcaggctgccgccgaacaggcgttgaaaaaactggagctggaatgagcatcgataaaagttactgcggatttattgccatcgtcggacgtccgaacgttggcaaatccacattgttgaacaaactgctggggcagaaaatctccatcacttcccgcaaggcgcagacaactcgtcaccgcattgtggggatccatactgaaggcgcgtatcaggcgatctacgtcgatacaccgggcctgcatatggaagaaaaacgcgccattaaccgcctgatgaacaaagcggcgagcagctctattggcgatgttgagctggtgatttttgtcgttgaaggcacccgctggacgccggacgacgaaatggtgctcaacaaactgcgcgaaggcaaagcgccggtaatcctcgcggtgaacaaagtggacaacgtgcaggagaaagccgatctgctgccgcacctgcagttcctggcaagccagatgaacttcctcgatatcgtgccaatctctgccgaaaccgggctgaatgttgacactattgcggcaatcgtgcgtaagcatctacctgaagcgactcatcacttcccggaagattacatcaccgatcgctcacagcgttttatggcgtctgaaatcatccgcgaaaaactgatgcgtttcctcggcgctgaactgccgtactccgtgaccgtggagatcgaacgtttcgtctctaacgaacgcggtggttatgacatcaacggtttgattctcgttgagcgtgaagggcagaagaagatggtcattggcaacaaaggggccaagatcaaaaccatcgggattgaagcgcgtaaagacatgcaggaaatgttcgaagcgcctgttcaccttgaactgtgggtaaaagtgaaatccggttgggccgacgacgaacgcgcactgcgcagtctcggttacgttgacgatctttaagagtaactccgatggaaggctggcagcgcgcatttgtcctgcatagtcgcccgtggagcgaaaccagcctgatgctggacgtcttcacggaggaatcggggcgcgtgcgtctggttgccaaaggcgcacgctctaaacgctctaccctgaaaggtgcattacagcctttcacccctctcttgctacgttttggcgggcgtggcgaagtcaaaacgctgcgcagtgctgaagccgtctcgctggcgctgccattaagcggtatcacgctttacagcggtctgtacatcaacgaacttctctcccgcgtactggaatacgagacgcgcttctctgaactttttttcgattacttgcactgcattcagtctcttgcaggggtcactggtacgccagaacccgcgctgcgccgctttgaactggcactgctcgggcatctgggttatggcgtcaattttacccattgtgcgggtagcggcgagccggtagatgacaccatgacgtatcgttatcgcgaagaaaaagggtttatcgcaagcgtcgttatcgacaataaaacgttcaccggaaggcagttaaaagcgttaaacgcacgggaatttcctgacgcagacacactgcgcgccgcgaaacgctttacccgcatggcgcttaagccgtatcttggcggtaaacctttaaagagcagggaactgttccggcagtttatgcctaagcgaacggtgaaaacacattatgaatgatgaggattgtcatggctgaattactgttaggcgtcaacattgaccatatcgctacgctgcgcaacgcgcgcggtaccgcttacccggatccggtgcaggccgcgtttattgccgagcaggcgggagcggacggcattaccgtgcatttacgtgaagatcgccgtcacattactgaccgcgacgtgcgcatcctgcgtcagacgctggatacccgcatgaatctggagatggcggtgaccgaagagatgctggcgatcgccgttgagacgaagccacatttttgctgcctggtaccggaaaagcgtcaggaagtaacaaccgaaggcggcctggatgtcgcagggcagcgtgacaaaatgcgcgatgcctgcaaacgtctggcagatgccgggattcaggtttctctgtttattgacgccgatgaagagcagatcaaagctgcggcagaggttggcgcaccgtttatcgagatccacaccggttgctatgctgatgccaaaactgacgccgaacaggcgcaagagctggcgcgtatcgccaaagccgcgacctttgccgcaagcctcggtctgaaagttaacgccggacacggtctgacctatcacaacgtgaaagccattgccgccatccctgagatgcatgaactgaatatcggtcatgccattattggtcgtgcagtgatgaccggactgaaagatgcggtggcagaaatgaagcgtctgatgctggaagcgcgtggctaatggcaatattaggtttaggcacggatattgtggagatcgctcgcatcgaagcggtgatcgcccgatccggtgatcgcctggcacgccgcgtattaagcgataacgaatgggctatctggaaaacgcaccaccagccggtgcgttttctggcgaagcgttttgctgtgaaagaagccgcagcaaaagcgtttggcaccgggatccgcaatggtctggcgtttaatcaatttgaagtattcaatgatgagctcggcaaaccacggctacggctatggggcgaggcattaaaactggcggaaaagctgggcgttgcaaatatgcatgtaacgctggcagatgagcggcactatgcttgtgccacggtaattattgaaagttaaaaataataccgttctctttaaaaagtaaaacccccgaactggtaaggaacgggggttttactttttaactttaattttgtgcagcatgcaccctcaacaacagcgattatggatcagtgtacttatcttttacaagcaacttgcaatctttagcataaaaactcgagcctttacgaagaaagcaatattgatggaaagattaacgtgaccgccaattcgtaagtacattaaaattggcttcgttattgaagattttgctgtgctttacaccatgccacagaattcccccattgaaacgagtggtgtcgtcaaagctctggtgtggagtgcagcatgcaccctcaataactcgcacgttcagttttggggagatgtaagggctaatctgaatggctgcattccttgtttaaggaaaaacgaatgactgattgccgatacctgattaaacgggtcatcaaaatcatcattgctgttttacagctgatccttctgttcttataacacaaggaaacgtacttaaggtgcgtccggtgaaccagtcggacgcacctttaataactataaataagtgtctgggcagatactatataaattaacttagtgaatgattatgctaatgtcatcaattaaataaatataatggcgttaaggcttcccagtaatataattaatactctacttccagagtagaatattaaattttatccgcgtggtgcatcagcacaaatttatcccacaactgttcttctgtctcgacatgcgccggatctttcacaatagtattggggatcgggcacaccttctggcaggttggtgtctcgtagtgccctacgcattcggtacacttatcgctgttaatctcgtagatatgatctcccattgaaatcgcctcattcgggcattcgggttcacacatatcacaattgatgcattttttagtgattaacaacgccataaggaaactctcaaaacaacacaaaccgggcgggcattatacgcgcattctttactcagaccagttttttcaccagcgcttcactatgacgaatacgttctggtgccagttccagatcctgctgaatcagcgcaatgaacagcaaatccgttaacattccctgagcgtgacaagcagagattgaagcactgtttgtcgcttgttcttcggcaatggtatacaggcaatgagaagcacgctgttgcagggcattcggagtaaagccggtaatcgccagcacttttccgcccactcgcagcatctcatctgccgccaggtttaactcgcgtcgtacaccggtgtaggaaatggctaataacagatcgtcaggggacgacgcctgtactgttgcgagtagcgcatgcatatcgcgcactgcggcagcattgaagccaatcttcatcagcttccaggcaaagttttgcgccaccagacccgaagcgccaataccggtcagaattatccgccgcgcagagcgcaacattgttacgcattcatgcagtttctcttcactattaacgtttagcgttgcgtacatagcggcagtattttctttaatcagtttttcgccgaccagccgtaacggatcatcaccgcggatttggttatgaatgggcacggagggtgattccggctggcttgccagcgcttcactcaacgccaacttaagcgccggaaaacctttatagccgagtttttgcgcgaacttcacgacgctggactgactgactccggcttcgttggccagttgctgagagcttaaatggcgcgccgtatcaggttgtagcagcagataatccgccagttttttatcactctgggcaagcccctggtaacgctgacggatacgaagtaagccgttcatatctttcctcgcgatgaaatagtggcgacaacaggcaatatgagacacacgcgagtgaattttatattccattgccgctaattgccatgaattaaaaattccagttagccatgatgcggtcgattgttgccggaaaagtgatgatctatctgttaggctatgtagtagcgaaaattaatcaggatgtttcagtccagaggagtatggtttggcaactcacgagcgtcgtgtagtgttttttgacttagatggaacattgcatcagcaggatatgttcggcagttttctgcgctatttactacgtcgccaaccgctgaatgcgttacttgtcctgccgttgttaccgattatagccattgcgttattgataaaaggtcgtgcggcacgctggccgatgagtctgcttctgtgggggtgcacttttggtcacagcgaagcacgtttacagacgttgcaggccgatttcgtgcgctggtttcgcgacaatgttaccgcctttccgctggttcaggagcgattaaccacctacctgttaagttccgatgctgatatctggttgattaccggctctccgcagccgctggttgaagcggtttatttcgatacgccctggctgccgcgggttaatcttatcgccagccaaattcagcgtggctatggtggttgggtattgacgatgcgttgtctgggacatgaaaaggtcgcacaactggagcgcaaaatcggcactccgctgcggctgtacagtggctatagcgacagtaatcaggacaatccgctgctttatttctgtcagcatcgttggcgagtaaccccgcgcggtgaactccagcaactggaatagagtaaagcatagcgtccgtgtataatgcgccgcgcttttataaccggagttttctttttgtctgaagtcgaatttagccacgaatactggatgcgtcacgcgctgacgctggcgaaacgtgcctgggatgagcgggaagtgccggtcggcgcggtattagtgcataacaatcgggtaatcggcgaaggctggaaccgcccgattggtcgccatgatcccaccgcacatgcagaaatcatggccctgcggcagggtggtctggtgatgcaaaattatcgtctgatcgacgccacgttgtatgtcacgcttgaaccatgtgtaatgtgtgccggagcgatgatccacagtcgcattggtcgcgtggtctttggtgcgcgtgacgcgaaaactggcgctgcgggatctttaatggatgtgctgcatcatccgggtatgaatcaccgagtggaaattacggaaggaatactggcggatgagtgcgcggcgttgctcagtgacttctttcgcatgcgccgccaggaaattaaagcgcagaaaaaagcgcaatcctcgacggattaattttgtttctcttcactccctttcctggaaaacagcagagagggagaatgggtcaaatagtttgatgacgactgggaaagaaacgagagaaaaggaaatttctctttgcccaactccgtaggcgataccgccggataatcctgcgccagttgcatcgccgcttctgtagcctgcttctctttctcttgcagataacccaccaggctaatctgatacttacgaatattttcgacataagcgtaggcttcatgtccacgagcgtagccgtaagtcagcttgctgtaatagggtttctggctaagtaaaggcagacgctgttttacgtcagcccaactgtcaggattccctttggtttttgccgtcagggcgcgggcatccagcatatgcgcatagcccatattgtacgcagcgagggcaaaccagatccgctcgttctccggcacactttccggcactttactcatcatatcctgcaaataacgcacgccaccgctgatgctctgttcggcatcggtacgatccgtaatgccgaggctttgcgcggtatttttggttaacatcatcatgccgcgcacacccgtcggtgaagtggcctgtgcatcccagtgcgattcctgataagcaatagcggccagcaaacgccagtcaatttcttcggcgtatttctcaaacaggggctttaactgcggcagtaccgcatcgacggcgcgtaaaaatgtgcgcgtatcgacgtaatcaaaatcatcgccatgccccaggtatttctcttcaatgcgtgccagcgtaccgtcttcattcatttcgttgaagaagtcgagcagggcggcggaaagggtattatcgccatctaacgggctaaaccaagtcaccggttgttcatcggtgatatcgagcgctacggcgagctccgggtgaacgcgctgaaacaggctgatggcgacagaatcagcaatggtgtaatcgagttttccttcgatgacatcttccattaattccgcagagccttttttgtcgtctaccttccagcttaattccgggaattttgtttctttcagggtctggagatcgttaaccaccacatgacccggtgcaacggtgagttgctccgccgtcaggttgcccagcgtacgtgggcgatactgacccactttataaaccagttgttgtgacacggaataataggtagggccaggctgataattttttacccgctcactgttatagacaagtcctgccgccagcaggtcggcgttaccattatcaaggtcgtcaaacagctggctgatattctgccgcacggtcactttcagttttacgccgaggtaatcggcaaactgtttcgccagttcgtaatccaggccaaaaggtttcccgttgatttcgttataagtcaggggagtatgaatggtgctcacacgcaactctccccgcgcttgaatggcggcgatacggttgtcggctttaccaaaccagggaatggatggccagagagcgaccgcgagcagcagtgccagaatgccgatgaacagataattaatctttaattttttcaattagttaattctctgtgtcgtgcgcgtcccagcttgaaaaaacgtaataatagtgaaaggtttactcataaatgagcggcattttgcgtaaacctgcgccagatggcaacttattacagccattggcggcacgcgttgctaattcacgatggtgattttatttccacgcaaacggtttcgtcagcgcatcagattctttataatgacgcccgtttcccccccttgggtacaccgaaagcttagaagacgagagacttatgatggaaattctgcgtggttcgcctgcactgtcggcattccgaatcaacaaactgctggcacgttttcaggctgccaggctcccggttcacaatatttacgccgagtatgtccattttgctgacctcaatgcgccgttaaacgatgatgagcacgcacaacttgaacgcctgctgaaatatggcccggcactcgccagccacgccccgcaaggcaaactcctgctggtgaccccgcgtcctggcaccatctctccctggtcttcgaaagcgaccgatattgcccataactgcgggctacaacaggtaaaccgccttgagcgcggcgttgcttactatatagaagccggtacgctgaccaatgaacaatggcagcaggttaccgctgaactgcacgaccgcatgatggaaacggtcttttttgctttagatgatgcagagcagttgtttgcccaccatcaaccgactccggttaccagcgttgatttgctggggcagggccgtcaggcgctgatcgacgctaacctgcgtcttggcttggctctggcggaagatgaaattgactatctgcaggatgctttcacaaagcttggtcgtaacccgaacgacatcgagctgtatatgttcgctcaggcgaactctgagcactgccgccacaaaatttttaatgccgactggattatcgacggtgaacagcagccgaaatcgctgttcaggatgatcaaaaatactttcgaaaccacgccagatcacgttctctctgcttataaagataacgccgccgtaatggaaggttctgaagtgggccgctactttgctgaccacgaaacgggccgctacgatttccatcaggaaccggcgcatattctgatgaaagtcgaaactcacaaccacccgacggcgatttctccgtggccgggcgcggcgacgggttccggcggcgaaattcgtgatgaaggcgccaccggacgcggtgcgaagccgaaggctggtctggttggtttctccgtttccaacctgcgaattcctggcttcgaacagccgtgggaagaagatttcggtaagcctgagcgcattgtcaccgcgctggacatcatgaccgaaggcccgctgggcggcgcggcgtttaacaacgaatttggtcgtccggcactgaatggctacttccgtacttatgaagaaaaagtgaacagccacaacggcgaagagctgcgcggttatcacaaaccgatcatgctggcgggcgggatcggcaacattcgcgccgatcacgtacaaaaaggcgagatcaacgtcggtgcgaagctggtcgttctcggcggcccggcaatgaacatcggtcttggcggcggagcggcgtcttccatggcgtcaggtcagtctgatgccgacctcgactttgcttccgtacagcgcgacaacccggagatggagcgtcgttgccaggaagtaatcgaccgttgctggcagcttggtgatgctaacccaattctgtttatccacgacgtcggtgcgggcggtctttctaacgccatgccggaactggtgagcgacggcgggcgcggcggtaaattcgaactgcgcgatatcctgagcgacgaaccgggcatgagcccgctggaaatctggtgtaacgaatcccaggaacgctacgtgctggcggttgctgctgatcaattaccgctgtttgacgagctgtgtaagcgtgagcgcgcaccctacgctgtgattggtgaagcgaccgaagaactgcatctttctctgcacgatcgtcattttgataatcagccgatcgatctgccgctggacgtcctgcttggtaaaacgccgaagatgacccgcgatgtacaaacgctgaaagcgaaaggcgacgcgctggcccgtgaagggatcaccattgcagacgcggtgaaacgtgtgctgcatctgccgactgtggcggaaaaaaccttcctggtgaccattggcgaccgcagcgtaaccggcatggtagcgcgcgatcagatggtggggccgtggcaggtgccggtcgctaactgcgcggtcactaccgccagcctcgacagctactacggtgaagcgatggcgattggcgagcgtgcgccggttgcgctgctggatttcgccgcctctgcccgtctggcggtcggtgaagcgttaaccaacatcgccgcaacacaaattggcgatatcaaacgcatcaaactttccgccaactggatggcggcggcaggccaccctggtgaagatgcgggcctgtatgaagccgttaaagccgtgggcgaagagctttgtccggcgctgggcctgacgatcccggtgggtaaagactccatgtcgatgaaaacccgctggcaggaaggtaacgaagagcgcgaaatgacgtcgccgctgtcgctggtgatttctgcatttgcccgcgtggaagatgtacgtcacaccatcacgccgcagctttctaccgaagataacgcactgctgctgattgatttgggcaaaggcaataacgcgctgggcgcaacggcgctggcgcaggtttatcgtcagcttggcgacaaaccggcagatgtacgcgatgtcgcgcaactgaaaggcttctatgacgcgattcaggcgctggttgcacagcgtaagctgctggcgtatcacgaccgctctgatggcggcctgctggtaacgctggcggaaatggcctttgctggtcattgtggcattgacgcggatatcgccactctgggtgacgatcgcctggcggcgttgtttaacgaagaactgggtgcggtgattcaggttcgtgccgctgaccgtgaagcggtcgagtccgtactggcacagcatgggcttgctgattgtgtccattatgtagggcaggcggtttccggtgaccgttttgtgattaccgccaacgggcagactgtattcagcgaaagccgcaccacgttgcgtgtctggtgggcagaaactacctggcagatgcagcgcctgcgtgacaacccggagtgtgccgatcaggagcatcaggcgaaatctaacgacgccgatccgggcctgaatgtaaaactgtcgttcgatatcaacgaagatgtggcagcaccgtatattgccactggcgcacgtccgaaagttgccgtactgcgtgagcagggcgtgaactcgcatgttgaaatggcggcagctttccaccgtgcaggctttgatgctatcgacgtgcatatgagtgacctgctgaccggacgcacgggcctggaagatttccacgccctggtcgcgtgcggtggtttctcctacggtgatgtgctgggtgccggtgaaggttgggcgaagtcaatcctgttcaatgaccgtgtacgcgatgagtttgcaaccttcttccaccgtccgcaaacgctggcgctgggggtatgtaacggttgccagatgatgtctaatctgcgtgaactgatcccaggtagtgagttgtggccacgttttgtgcgcaatacctccgatcgctttgaagcgcgtttcagcctggttgaagtaacccaaagcccgtctttgctgttgcaggggatggtgggctcgcaaatgccgattgctgtctctcatggtgaagggcgcgtggaagtgcgtgatgcggcgcatctggcggcactggaaagcaaagggctggtggcactgcgctatgtcgataacttcggcaaagtcactgaaacctacccggctaacccgaacggttcaccgaacggtattacggcagtcacgactgaaagtggtcgagtcaccattatgatgccgcacccggaacgtgttttccgtactgtcagcaactcctggcatccggaaaactggggcgaggatggcccatggatgcgcattttccgcaatgcgcgtaagcagttggggtaagtcgtcagcccattggttttgcagcccggatgcggcattaagcaccaaccactatcataagctcccaactccgggagcttttttgtgtctgtaaatcacgacaatgggtggtttgccgtgtcgctttctggcgacacttaactcattgattttaatattatctaataagtttatcttaagttgtctctttttagcgacacagtggctgatttacattcaaacagcggaggagacataaacccctcaaagcaacgtataatcagtacgttaccaaactattttctttattggcacagttactgcataatagtaaccagtggctcattcaccgacttatgtcagccccttcgggacgtgctacataaaatacgaatgacgcacaacaaggtgcctgccgtccaacttctgatatcagcgtagctatatcaaccatcgggcgaaacgtcgagttaggcaccgccttattccataacaaagccgggtaattcccggctttgttgtatctgaacttcccctcggttagcatcaggctattcgcgtctgacgagagtaacaccttgaaacgctggcccgtttttccccgctcattacgacaactggtaatgctggcatttttgctgattctgctgcccctgttggtgctggcatggcaagcctggcaaagcctgaatgcgcttagcgatcaggcggcgctggttaaccgcactacgcttattgatgcccggcgcagtgaagcgatgaccaacgcggcgctggagatggagcgtagttaccgtcagtattgcgtgctggacgacccaaccctggcgaaggtttatcaaagccagcgcaagcgttacagcgaaatgctcgatgcccacgcaggcgtgctgccggacgataaactctaccaggcattacgtcaggatttgcacaatctggctcaacttcagtgtaacaacagcggtcccgatgctgccgccgccgcacgtcttgaagcctttgccagtgccaataccgaaatggtacaggccacgcgcacagtggtgttctctcgtgggcagcagcttcagcgtgaaatcgccgaacgtgggcaatattttggttggcaatcgctggtgctatttctggtgagtctggtaatggtactgcttttcacgcggatgattatcgggccggtgaaaaatatcgagcgcatgatcaaccgtctgggggaagggcgttctctgggcaatagcgtctcgttcagtggaccgagcgagttacgctcggttgggcaacgtattctttggttaagtgagcgcctgtcatggctggaatcccaacgccatcaatttttaagacatttatctcatgaattaaaaacgccactggcgagtatgcgcgagggcactgaattactggctgaccaggttgtcgggccgcttacgccagagcaaaaagaggtggtgagcattcttgatagcagcagccgcaatttgcaaaaactgatcgaacaactgcttgattacaaccgtaaacaggcggacagtgcggtggaactggagaatgttgagttagcaccgctggtggagacagtggtttctgctcatagcctgcccgcacgggctaaaatgatgcataccgacgtcgatctcaaagcaacagcttgcctggcggagccaatgctgctgatgagcgtactggataatctttactccaatgcggtgcactacggggctgaatccggtaacatttgccttcgcagcagttcacatggtgcgcgggtttatattgatgtcatcaatacaggcacgcccattccgcaagaggaacgcgccatgatcttcgaacccttttttcagggaagccaccagcgaaaaggggcggtgaagggcagcggtctgggattaagcattgccagggattgtattcgccgtatgcaaggggaactgtatctggtcgacgagagcgggcaagacgtttgtttccgcattgaattaccgtcgtcgaaaaacacgaaataatgctaacagcctatcctatcaggctattttatttgtcagttcggccccgggcagtgctcgaaatcttcacgtacgatatgtacgctccggtttctccgcgctgtccatgtccagactgtctgcaacaattacgcccactgggataggctttaagtctggtgaatatgcgacacatttttcaacgattattgccccgacggctgtggctggcagggctgccatgtctggcattgctgggttgcgtgcagaatcacaataagccagccattgatacgccagcagaagaaaaaattccggtttatcaactggctgactatctttctactgaatgtagcgacatctgggcgctgcaaggtaaatcaaccgaaaccaatccgctttactggctgcgggcgatggattgtgctgatcgtttaatgcctgcgcagtcgcgtcagcaagctcgccaatatgacgacggcagctggcaaattacctttaaacaagggattttgctcgccgacgccaaaattacgccgtatgagcgccgccagctggtcgcgcgtattgaagcgttaagtaccgagatcccggcacaggttcgcccactgtatcaactctggcgcgacggtcaggcgctgcaactgcaactggcggaagagcgccaacgttacagtaaactccagcagtccagcgacagcgagctggatacattgcgccagcaacatcacgttctacagcagcaactggaactcaccacccgcaagctggaaaacctgaccgatattgaacgccagctctcgacccgcaaaccggctggaaatttctcgccggatacgccgcacgagagtgaaaagcccgcgccatccacccatgaggtcactcctgatgagccataaacctgcgcatttattattggtcgatgacgatccgggattgctgaaactgcttggcctgcgcctgaccagcgaaggctacagtgtggtcacggcggaaagtggcgctgaaggattacgggtactgaatcgcgaaaaagtagatttagttatcagcgacctgcggatggatgaaatggacggtatgcagctatttgctgaaatccagaaagtgcagccgggaatgccagtaattattcttactgcgcatggttctatccccgatgccgttgctgcaacacagcagggcgtttttagtttcctcaccaagcctgtcgacaaagacgcgctatatcaggcaattgacgatgcgctggagcaatccgcgccagccaccgatgaacgctggcgcgaggcaattgtcacccgcagcccgctgatgctgcgtttgctggaacaggcgcggctggtggcgcaatcagacgtcagcgttttgattaacggtcagagcggcaccgggaaagagattttcgcccaggctatccacaacgccagcccgcgcaacagcaaaccatttattgctattaactgtggcgcattgcccgagcaattgctggagtcggagctgtttggtcatgcgcgtggcgcgtttactggcgctgtcagcaatcgcgaaggtttattccaggcggcggaaggcggaacgctatttctcgatgaaattggcgatatgcctgcgccgttacaggtcaaactgctgcgcgtgttgcaggagcgtaaagtgcgcccgctgggcagtaaccgcgatattgatatcaatgtgcggattatttctgccactcaccgtgatctgccaaaagcgatggcgcgcggggaattccgcgaagatctctattaccgcctcaacgttgtcagcctgaaaattccggctctggcagagcgcacagaagacattccgcttctggcaaatcacctgttgcgccaggcggcagagcgacataaaccgtttgtccgcgcgttctccactgatgcgatgaaacgcctgatgaccgctagctggccgggtaatgtgcgccagttggtcaacgtgattgaacagtgcgtggcgctgacctcatctccggttattagcgatgcattagtagagcaggcgctggagggtgaaaacacggcgctgccaacctttgttgaggcacgtaatcagtttgaactcaactatttgcgtaagctgctgcaaattaccaaaggcaacgtcacccacgcggcgagaatggcggggcgcaaccggacagaattttataaactgctttcccgacacgagctggatgcaaacgatttcaaggaatgaattggcgttatgtgttacgtttagcagatcaaaagacaggcgaccttttcaaggaatagcatgaaaaagattgatgcgattataaaacccttcaagctggacgatgtccgcgaagcactggctgaagtcggcattaccggcatgacggtcactgaggtgaaaggttttggccgccagaaaggccataccgagctgtaccgcggcgcggagtatatggtggattttctgccgaaagtgaaaattgagattgtcgtaccggacgacattgtcgatatctgtgtcgataccattattcgcacggcgcaaaccggcaaaatcggtgacggtaaaatcttcgtctttgacgtggcacgggtcattcgcatccgtaccggtgaagaggacgacgcggcaatttaaaccgcgtcaagggttgccggatgtttccatccggcaacatcaaattacagcaccttatgcgggccaaagcattcgtaatgaatgttttcctgcttcacgcccagatccactaactgtttcgcggtaaactgcatgaagccaaccgggccgcagagatagaactgcattgtcggatcgctgaacgcaccttccagtttgctcaaatccatcagaccttcgctatcaaactgacctttagcgcgatcggcttcgctcggctgacgataccaggtgtgcgcggtaaagcgcggcagtgactgccccagttccttaacttcatcggcaaaggcgtgaacatcgccattttctgccgcatggaaccagttcacttgtgctgtgtggcctgcttttgccagcgtgtcgagcattgccagcattggcgtttgaccaacaccggcagagattaacgtcactggtgtgtcatctgcgacagccataaagaaatcacctgccggagcgaccagtttcacgacatcgccaacattggcgtgattgtgcaaccagttggatacctgcccaccctcttcgcgtttcaccgcaatacgatagcctttgccatccggtttgcgagtcaaagagtactgacgaatttcctgatgcgggaaaccttccggtttcagccagacgccgagatattgccccggacggtattctgccactgcgccaccgtcgaccggctccagttcgaagctggtgataagcgcgctgcgcggtgttttagccacaatgcggaaatcgcgagtaccttcccaaccaccggctttgctggcgttttcgttatagatttccgcctcgcgattgataaatacattagccagtacaccataggctttaccccaagcgtccagcacttcctgccccgggctgaacatttcgtccagcgtcgccaacaggtgttcgccgacgatgttgtactgttccggtttgatctggaaactggtgtgcttctgcgcgattttttctaccgctggcagcagcgcaggcaggttttcaatattactggcgtaggcggcaatagcgttaaacagggcttcacgttgatcgccattacgctggttactcatgttaaaaatttctttgagttctgggttatgagtaaacatacggtcgtagaaatgggcggttaactttggccccgtttccaccagtaaagggatggtggcttttactgtagcgatggtttgagcgtcaagcatatggtcttcctttttttgcatcttaattgatgtatctcaaatgcatcttataaaaaatagccctgcaatgtaaatggttctttggtgtttttcagaaagaatgtgatgaagtgaaaaatttgcatcacaaacctgaaaagaaatccgtttccggttgcaagctctttattctccaaagccttgcgtagcctgaaggtaatcgtttgcgtaaattcctttgtcaagacctgttatcgcacaatgattcggttatactgttcgccgttgtccaacaggaccgcctataaaggccaaaaattttattgttagctgagtcaggagatgcggatgttaaagcgtgaaatgaacattgccgattatgatgccgaactgtggcaggctatggagcaggaaaaagtacgtcaggaagagcacatcgaactgatcgcctccgaaaactacaccagcccgcgcgtaatgcaggcgcagggttctcagctgaccaacaaatatgctgaaggttatccgggcaaacgctactacggcggttgcgagtatgttgatatcgttgaacaactggcgatcgatcgtgcgaaagaactgttcggcgctgactacgctaacgtccagccgcactccggctcccaggctaactttgcggtctacaccgcgctgctggaaccaggtgataccgttctgggtatgaacctggcgcatggcggtcacctgactcacggttctccggttaacttctccggtaaactgtacaacatcgttccttacggtatcgatgctaccggtcatatcgactacgccgatctggaaaaacaagccaaagaacacaagccgaaaatgattatcggtggtttctctgcatattccggcgtggtggactgggcgaaaatgcgtgaaatcgctgacagcatcggtgcttacctgttcgttgatatggcgcacgttgcgggcctggttgctgctggcgtctacccgaacccggttcctcatgctcacgttgttactaccaccactcacaaaaccctggcgggtccgcgcggcggtctgatcctggcgaaaggtggtagcgaagagctgtacaaaaaactgaactctgccgttttccctggtggtcagggcggtccgttgatgcacgtaatcgctggtaaagcggttgctctgaaagaagcgatggagcctgagttcaaaacttaccagcagcaggtcgctaaaaacgctaaagcgatggtagaagtgttcctggaacgcggctacaaagtggtttccggcggcactgataaccacctgttcctggttgatctggttgataaaaacctgaccggtaaagaagcagacgccgctctgggccgtgctaacatcaccgtcaacaaaaacagcgtaccgaacgatccgaagagcccgtttgtgacctccggtattcgcgtgggtactccggcgattacccgtcgcggctttaaagaagccgaagcgaaagaactggctggctggatgtgtgacgtgctggacagcatcaatgatgaagccgttatcgagcgcatcaaaggtaaagttctcgacatctgcgcacgttacccggtttacgcataagcgaaacggtgatttgctgacaatgtgctcgttgttcatgttggatgcggcatgaacaccttctcaggcctacaaaatcttgcaaattcaatatattgcaatctccgtgtaggcctgataagcgtagcgcatcaggcaatttttcgtttatgatcatcaaggcttccttcgggaagcctttctacgttatcgcgccatcaaatctgtcgtaactgcgcctcaacatacaaatagccaattcccagcacctgttgggcgcggcttaattgcccaaagccaatttgcgtcgctttcacgctcggtccttcgtcgcggtcgaacgggttaaatcctgtctggcgaataatagtattaagccagttctcaccaaaggcacaactgcgaccgtacaaccaaatctgattaatattgaggatgttgaggaagttatacagactcaaaccaatggcattggcagagcgatcaacccagctggtgatccacggttctccactctgccaggcagcgattaactgcgcggttgtcagtttttcaggatcaagctgagtattaaccggttgtgattttagccatacccgcgcctgtttttttaatgcacttaacgaggcgacggtttccaggcagccgtaacgtccacagtcgcagacgacgccatccggattaacgatggtgtgaccaatctgtccgctaccatacaaactgccgcgataaatttgctcgttaatcacgaacgacgagccaatgccgtaatcaacgttgatcacgcagaaatcccgttcctgcgaattattttgccatttctccgccagcgccagcatcacgcagtcattatcgaccatcacccgaatgccgagcttctcttccagcagatatttcacctccaccggcgttgtccacggcgcttgcggcatggtttgcgacacgccggtcacaggatcaacctgaccgtggattgccagcgccagattgatggtgcggtccggccacaatttacggtggcgatgccagcatttttcgatttcggacagcagcgcctgcggcgtcggtgcatcaatctgtaaatactcaaactcgcctttcggacttaaacaagcattagcaacctgacactcaatactggtgggcgtcacgttcaggcacagcgtccagtcaccttccggcgcaatcagccatgtaccgctactatgcccgcgcgtctgacttttatcgtcgatattcaccacccgtttttcgctttccagttcctgcaaaatattactgaccgccggaatcgaaatttgcgccagccgggccagcgttgatttattggcgcgcttttgccggtacagcagttccagaatcacgcatttgttatggtggcggatctgttgattgttaatgcaggctctcatcttcactaaaccttgtttagttaattgcgtgattattccgcgaaaacattgccagattgttcaatacactgccacaaatcttttaattcagtatgtcttgttaatattgagggcaccatgactccagtaaaagtgtggcaagagcgcgttgagatcccgacctatgaaaccgggccgcaggatatacatcctatgttcctggaaaatcgcgtttatcagggatcgtccggcgcggtttatccctacggcgtgaccgatacgctgagcgagcagaaaaccctgaaatcctggcaggcggtgtggctggaaaacgactacatcaaagtgatgatcctgccggaactgggcggtcgggtgcatcgcgcatgggataaagtgaaacagcgcgattttgtctatcacaatgaagtcattaaacctgcgctggtggggctgctgggaccgtggatctctggcgggattgagtttaactggccgcaacaccatcgcccgaccacctttatgcccgttgatttcaccctcgaagcccatgaagacggcgcacagacggtgtgggtcggcgaaacggagccgatgcatggtttacaggtgatgacaggtttcaccctgcgccctgaccgggcggcgctggaaatcgccagccgcgtctataacggcaacgccacgccgcgtcatttcttgtggtgggccaacccggcagtgaaagggggggaagggcatcagagcgttttcccgccggatgtgactgcggtgtttgatcacggcaaacgggccgtctccgctttccccatcgccaccggcacttactacaaagtggactactccgctggagtggacatttctcgctataaaaatgtgcccgttccaacctcatatatggctgaaaaatcacagtacgattttgttggcgcgtggtgtcacgatgaagatggtggtttgctacacgttgccaaccaccatattgcgccaggtaaaaagcagtggagctggggacacagtgaatttggccaggcgtgggataagagtctgaccgacaataacggcccgtatatcgaactgatgaccggtatttttgccgataaccagcctgattttacctggcttgatgcttacgaagagaagcgttttgagcagtatttcctgccttatcattctttgggcatggtgcaaaatgcctcccgcgatgcggtgataaaactccagcgtagtgagcgggggattgagtgggggctttatgccatctctccgttgaacggataccgcctggcgatccgcgaaatcggcaaatgcaacgcgttacttgatgatgccgtggcactgctgcctgcgaccgccatccagggcgtgttgcacggtatcaatcctgaaaggctgaccattgagctctccgatgccgacggcaatattgtactgagttatcaggaacatcagccgcaagagttgccgttgccggacgtcgccaaagcgccactggcagcacaagacattaccagtacagatgaagcctggtttatcggtcagcatctggagcaatatcatcacgccagccgttcaccgttcgattactacctgcgcggcgtggcgctggatccgctggattaccgctgtaacctggcgctggcgatgctggaatataaccgcgcagatttcccgcaagcggtggcgtatgccactcaggctctgaaacgcgcacatgcgctgaacaaaaatccgcagtgcggacaggcgagtttgattcgcgccagtgcttacgaacgtcagggacaatatcaacaagccgaagaggatttctggcgtgcggtctggagcggcaacagcaaagccggtggctattatggcctggcacgactggcggcgcgtaatggtaacttcgacgctggtctggatttttgccaacaaagtcttcgcgcctgcccaaccaatcaggaagtgctttgcctgcataatctgctgctggtgttaagtggtcgtcaggacaacgcgcgtgtgcagcgcgagaaactgctgcgcgattatccgctgaacgccactctgtggtggctgaactggttcgatggtcgtagcgaatcagccctcgcgcagtggcgcggtctgtgtcagggacgcgacgttaacgccctgatgaccgccgggcaactgattaactggggaatgcccaccctggcggcagagatgctgaacgcactggactgccagcgcacgctgccgctttacctgcaagccagcttgctgccgaaagccgaacgtggcgaactggtcgcaaaagccattgatgtcttcccgcagtttgtccgtttcccgaatacgctggaagaagtggcggcgctggagagtattgaagagtgctggtttgctcgccatttactggcctgcttctactacaacaaacgtagctacaacaaagccattgccttttggcaacgttgcgtagagatgtcgccggagtttgccgacggctggcgcgggttagcgatccatgcgtggaataagcaacacgatgatgagctggccgcgcgttatcttgataatgcttatcagcttgcgccgcaggatgcacgtctgcttttcgaacgggatttgcttgataagttaagtggagccacaccggagaaacgactggcgcgtctggaaaataatctggaaattgcgctgaaacgcgacgacatgaccgcagaactgctcaatttgtggcatctcacgggtcaggcagacaaagcggcggacattctcgccacgcgtaaattccacccgtgggaaggcggggaagggaaggtcaccagtcagtttatcctcaaccagttattacgcgcctggcagcatcttgatgccagagagccgcagcaggccagcgaactgcttcatgccgcgctgcattatccggagaatttaagcgaaggccgtttaccggggcaaactgataacgacatctggttctggcaggcgatatgcgccaacgcgcagggcgatgaaactgaagcgatgcgttgtttacgtctggcggcgaccggcgatcgcaccattaacatccacagttattacaacgatcagccggttgattatctcttctggcaaggaatggcgctgcgactgctgggtgaacagcaaaccgcacagcaactgtttagtgaaatgaaacagtgggcgcaagagatggcgaaaaccagtattgaggcggatttctttgctgtttcacaacctgacctgttatcgctgtatggcgatttacaacagcagcataaagaaaaatgcctgatggtggcgatgctggcgtccgcgggactcggggaggttgcgcaatatgagtctgctcgcgctgaattgacggcgattaatccggcctggccgaaagcggcattattcaccactgtgatgccttttatttttaactacgttcactaaaccctattaactgtaatatttgagcggcacgcgctgccgctcatcacaaaataattagaataagccgttgttaataaaaaccctacaggaggcactatgcctaaaaaaatgagaacaacccgtaatctattattaatggctacgctattaggtagcgcactatttgccagggctgcggataaagaaatgaccattggtgcaatataccttgatacccagggatattacgctggagtgcgtcagggcgttcaggatgcggcaaaagattcttcagtacaggtacagttaattgaaactaacgccctgggtgatatttcgaaagaaagtacctttgttgataccctcgtggcgcgtaatgtcgatgccattattttatcggcagtgtctgaaaatggcagtagccgtaccgttcgtcgcgccagtgaagcgggtattccggtgatttgctacaacacctgtattaatcaaaagggggtcgataaatatgtctcggcgtatctggtcggcgatccgctggaatttggtaaaaaactgggtaacgctgccgccgattattttattgccaataaaattgaccagccgaaaattgccgtcatcaattgcgaagcctttgaagtttgtgtgcagcgacgtaaaggatttgaagaagtattaaaatcccgcgttcccggcgcgcaaattgtcgctaatcaggaagggactgttttagataaagcgatttccgttggtgaaaaactgattatctccacgccggatctcaacgccattatgggggagtcgggcggtgcgacactcggcgcggtaaaagcggtacgtaatcaaaatcaggccggaaaaattgctgttttcggttcggatatgacaaccgaaattgctcaggagctggaaaacaatcaggtgctgaaagcggtagtggatatttccggtaagaaaatgggcaatgctgttttcgcgcaaacattgaaggttatcaataaacaagccgacggtgaaaaagtgattcaggtgcctatcgatctctataccaaaacggaagatggtaaacagtggctggcaacgcacgttgatggtctgccctaatcgctgattcgcagaggtccctatgttcacggcaacagaggcagtcccggtagcaaaagtggtggcaggaaataagcgttatcccggcgtcgttgcgttggataacgttaacttcacgctcaataaaggcgaagttcgtgcactgctaggtaaaaacggcgcgggcaaatcgaccctcattcgaatgcttaccggcagcgaacgcccggatagcggtgaaatctggattggcgagacgcgactggaaggcgacgaagctacgctgactcgccgtgccgctgaactgggggtacgcgcggtttatcaggagttaagtctggtggaagggctgacggtggcggaaaacctctgcctcggtcagtggccccgccgcaacggcatgattgattacctgcaaatggcgcaggatgcccaacgttgcttacaggcgttgggcgttgacgttagtcctgaacaacttgtttcaacactaagcccggcgcaaaagcagctggtggaaattgcgcgggtgatgaagggcgagccgcgcgtggtcattcttgatgaacctaccagttcgcttgcgagtgcggaagttgaactggtgatcagcgcggtgaaaaagatgtcggcactgggcgtggcggtgatttatgtcagccaccggatggaagaaattcgccgcattgcctcctgtgccaccgttatgcgcgatggtcaggtggcgggcgatgtgatgctcgaaaacacctccacgcatcatattgtgtcgctgatgctcgggcgcgatcacgttgatattgcgccggtagcccctcaggaaattgtggatcaggccgtgctggaagtccgtgcgttacgccataagcccaagctggaggatatcagttttacgctacgtcgtggcgaagtgctcggcattgctggtctgctgggggcagggcgcagtgaattgctgaaggcgattgttgggctggaggagtatgaacagggcgaaattgttatcaacggcgagaaaatcacgcgccccgattacggcgacatgctgaaacgcggcattggctatacgccagaaaaccgcaaagaagcggggatcattccctggttgggcgttgacgaaaatacagtgctgaccaatcggcaaaaaatcagcgccaacggtgtgctgcaatggtccaccatccgccgcctgaccgaagaggtgatgcagcggatgacggtcaaggccgccagtagcgaaacacccatcggcacgctttctggtggcaatcagcaaaaagtggtgatcggtcgttgggtctatgctgccagccagattttgttgctcgacgagccaacgcgcggcgtcgatatcgaagccaaacagcagatttaccgtattgtccgtgagctggctgccgaaggaaaaagcgtggtgtttatctccagtgaagtggaggagttgccgctggtgtgtgaccgcatcctgttattacagcacggcacgttctcgcaggagtttcacgctccggtcaatgtggatgagctgatgtccgccattctgtctgtgcactgatgaattttaccgaggaacctgaagatgtctgcttcgtcattaccattgccgcagggcaagagcgtctcgctcaaacaatttgtcagtcgccatattaatgagatcggtttgctggtggtgattgccattctttatctggtcttctccctgaacgcgcctggctttatctcattgaataaccagatgaacgtgctgcgcgatgccgccaccattgggattgccgcctgggcgatgacgctgattattatctccggtgaaattgatgtcagcgttgggccgatggtggcttttgtctcggtgtgcctggcatttttgctgcaatttgaagttccgctggcggtggcgtgcctgctggtgttgctgttaggcgcgctgatgggaacgctggccggggtgctgcgcggcgtgtttaatgtaccaagtttcgttgccacactggggctgtggagcgccctgcgcggaatggggctgtttatgacgaacgcactgccagtgccgattgatgaaaacgaggtgctggactggctgggcggacaatttctcggtgtgccggtatccgcgctgatcatgattgtgttgtttgcgctgtttgtgttcatcagccgcaaaaccgccttcgggcgctcggtttttgccgttggcggtaatgctacggcggcgcagttgtgcggcatcaacgttcgtcgggtgcgcattcttatctttaccctttcgggattattagcggcggtgaccggcattttgttggcggcgcgcctcggttctggtaacgcaggtgccgcaaacggtctggagtttgacgtcatcgccgcggtcgtggtcggcggtacggcactttccggcggtcgcggttccctgttcggtacattgcttggtgtgctggtgattacgctaatcggtaacggtctggtgctgctcggtattaactcctttttccagcaggtggtacgcggcgtcatcatcgtggtggcggtgctggcgaatatcttgctgacccagcgaagcagtaaagcgaaacgctaaaccttaacgcccctggcgcgggtgcggcagggatgaaaattaatcgtattgttaatgagggatttatgaaaacgatgctggcagcttatttaccaggaaattcgaccgtcgatctgcgggaagttgcggtgccgacgccggggattaaccaggtactgatcaaaatgaaatcctccgggatttgcggaagcgatgtccactatatctatcatcaacaccgtgccacagcggcggcacccgataaaccgttataccagggctttatcaacggtcatgaaccgtgcgggcagattgtggcgatggggcaaggctgccgccattttaaagagggcgaccgcgtgctggtgtatcacatttctggctgtggtttttgcccgaactgccgtcgcggttttcctatttcttgtactggcgaaggaaaagcggcttacggctggcagcgtgacggcggtcatgccgaatacttgctggcggaagaaaaagatctgatcctcctgccggatgcgctgagctacgaagatggtgcgtttatcagttgcggcgttggtacagcgtatgaaggaattttgcgcggcgaagtttccggcagtgataacgtgctggtggtcggtctggggccagtcggcatgatggcgatgatgctggcgaaaggtcgcggtgcaaaacggatcatcggcgttgatatgctgccggaacgtctggcgatggcaaaacagttaggggtgatggatcacggctatttagcaaccaccgaaggtctgccgcagattatcgccgaactcacccacggtggcgcggatgttgcgctcgattgttccggtaatgccgcaggtcgcttgctggcactgcaatccaccgctgactggggacgggtggtttacattggtgaaaccggaaaagtggaattcgaggtcagcgccgatctgatgcaccatcaacggcggattatcggctcctgggtgaccagtctgttccatatggaaaaatgcgcccatgatctgacggactggaagctgtggccgcgtaacgccattacccatcgcttctcgctggaacaggcaggtgatgcctatgcgctgatggcgagcggcaaatgcgggaaagttgtgattaacttcccggattaaggagttagcggatgaccatctataccttatcccacgggtcgctaaagctggacgtttctgaccagggcggcgtaatcgaaggcttctggcgcgatacgacgccgctcttacgtcctggtaaaaaaagcggtgtggcaaccgatgcctcatgttttccgctggtgccatttgcaaaccgggtgagcggcaatcgttttgtctggcaggggcgtgagtatcaactgcaaccgaatgttgagtgggatgcgcactatctacacggcgatggctggctgggcgagtggcaatgtgtctcgcacagcgatgatagtttgtgtctggtgtatgaacatcgcagcggtgtctatcactatcgggtaagtcaggcgtttcatttaacggcggatacgctgacggtgacgctctctgtcaccaatcaaggggcagagacgctgccatttggtaccggctggcatccttattttccgttgtcgccgcaaacgcggattcaggcacaggcgagcggttactggctggagcgggagcagtggctggcgggtgagttttgcgagcagctaccgcaggaactggattttaaccagcccgcgccgttgccgcgccagtgggtgaacaatggttttgccggatggaatggtcaggcccgcatcgagcagccgcaggaaggttatgccatcatcatggaaacgacgccacctgcaccgtgttatttcatctttgtttccgaccctgcgtttgataaaggatatgcgtttgatttcttctgtctggaaccgatgagccatgcgccggatgatcatcatcgcccggaagggggtgatctcattgcgctagcaccaggggaatcaacaacttcagagatgtcgttgcgggtagagtggctgtaatttattaaatgccggataaggcgttcacgccgcatccggcatctttcctaacgccgatcgagagaaattgcccccggcccggtaattgccaatagcaagaacgcgccagcgatactgacattcttccagaaattaatcatatttggcccaaccgcatcgccggtcatatcccagtaatggtgaccaatcaccgccgtacccagcgtgtagaaaataaacagcaccgccagcggacgggtgaaaaagccaagcacgattaatatcgcggcgggcacttccataactaccgcaataatcgctgccagcatcggcattggcgcgcccaacgaggccatatattggaccgtaccgtcaaagcccatcattttgggaaaaccaaaaataatgaaaattaagaccacggcgatacgggcaattaataacaaaacggggcgggcagctccaaaatcaaaataacgtagtgtgttcataaccaatccctttgcaagataatgtgatttaaacgtaatacacactcttgcacctcgccacgccccaggcattgagatattcgctaattatcctggttacagtgatttaagcgcgatgttctcatctatcagcagtttcgcatcaaacgttttgccgctctggatccatttgcgaattgggcgaatctcacgcccctgattcagcgtgaccgcaccgataagcacgccgttttgcagattaaaccaaatcgccttctgagtttccgggttgccacgacaaagccagtcatcgccacgcatatcgccaataaactgtaagttatcactgtactgatcgctccagaaccacggcggcggcagtagcggtagcggtagccctaacattgcggcagcggcaatttgcgcctggttattggcgttttcccagctttcgcagcggtgtagtgcaccattatcaagacgagtgattgccacatcgccaccggcaaagatcgcgggatcgcaggtgcggcaagcctcatcaatgacaatgccattggcagtatcaaggttggcctcgcgagccagttgctcgttggcgctgataccaataccgtaaatcaccacatcagcctgaagcgtttccccactttgcagcgtcagttctactttttcaccatcgaccacatgttcaatggcattattgagcagaatgcgcacaccagcctgctggtggcgctgtaaaagatagcgttgcacgggcggtggtgcattacggcccatgacggttgccgccagttcaatcactgtcaccttacatctgcgctgcgtggcgctggcagccagttccagaccaatagttccggcaccgataatcacgactgaccgttcgggctgcagaacttctcgcagtctggcggcatcaccggcatggcgtagggtaaagcagcgttctcccagtgcatcaagcaacggcagcggtcgagctgccgcgccggttgctataaaaagctgatcccagtgccagctttcgccgttggttaacactaactctcgtgtgtcgcgacccagcgttttgatggttacaccggaatgcagatgaacattgttttcctgccaccagttagcgggtaacacctgctgtaactgcggggaatcttccagcaacatggatttcgagagtggaggtcgttcataaggaagatgtcgctcatcggaaaacagatgcagctcaccggtgaacccttgctggcgtagcgaggccgcagccattgccgccgcttgcccgccaccgacaataatgatcgttttttctttcatcgtgcttccttaaagatccagcccagccgctacgtggcgaatgccgcgaatcgctaaacccgcatcagcgttgatcatcacaccgcttaatgcgcgattattgcgccgcgatgtcaacatcacatacggccccgtaaaatccgccggttgcgggaaaaattgcagcggtaaaatggcggcaattttctccggcgtcagagactgcattatcgaggtttcactttgcccgagcgcctgtgggccgcgcaggtcgctggccataccacacgggccgacgccattcacccgcactttcggtgccagttcataagccagttggcgaataagtccggttgcggcatgtttactggcggtgtacagcgggccaccgccgccaggataccaggcggcatttgacagtgtgaaaatcatgctgccttcactggcgattaacgccggagcgcaggcttttgcgcccagcaggtaaccgagaacattgacgttaaacagctcgtggaagccggtttcgagcgtctctgcgggagtattaaccagtgaggcattgtgatcccagatgcctgcattgccgataaaacaatccagcttgccggaacgagtcaggatctgatcgaccgcgcgttgataatcggcataacaggtcacgttaccttccaccgccagaatatgttcgccaaatcgctgacgcagactggcgacttttgccgccgacagttccagcgtggcaacctgcgcgccttcttcgataaatcgctcgaccagcgccagccctaatcccgatccgccgccggtaataaaaatggactcgttatgcagatcgctcatggctgcgcctccggtaagtcgatgaaaatgtcaccaccttcaacgtgtactggataagtggtgagcggatcggtggcgggcaggcataacgctttccccgttttcaggcaaaaactggcggcgtgtagcgggcactccaccgtggcgtcatcttccagatacccttctgacattgacgcattaccatggctgcaacgatcgttaatggcataaaactcgccgccaacgttgaacagggcgatgacgggcgaggtatcgatccggagagcctcaccctccggcacatccgcaacgggacacgcataaattcgattcatcagaacagtacactcaggttatgggaagtgattaccgcttgatccaggacgatatcccgttccagcaagcgccagttgtcatcttccagacggcgaactttgtcgaaacgcgttccaacatagaatgtttcatcgcgctctttttgtgcccgataaagcagataatttacccgcacagcaaatacgtttgggatgtcggtttcgcttatctggcagttgctgattaagtgacgggtgcgtgacggcggctcttctgcccaggccatgcccgtttccagacgggcgattcgccgctccagctggtctttggtgtcattaaaaatccaggttgtcggtggctggacgcctttgcggcggtcgcgtgtttgcgcgttaactgtggtgcgcatggtgtaacgaatctcttcgtcgagctgcgccagccagtcacgaaatttccagtcgtccagtaagctggcttcgtgaaagagaaactggctaatgcggtgatgtaactctagtgaaacttgcgcactcatttcatcacctcctgctggtaagcggcggttttatcgagcacttcctgccagctttcgctactcagaagatcggcccagcgttggtacattccacgagcggcagtttctgaaaagatatagttagtaatgccaggaatgccgtcgtcgcggcgcttttcctgaccaagccccatttccagacacagtttgctgttgcgggcgcggtggcctttaagcaatttctggatttcacaccagttctccgagtcatcctgctcgagaaaaccagcaggaccaaaagcacgagtggcgctgttttcaaaagcggctttaacttcatcggaggcggctttgtcagtaatacagaacgcccacacttcaacttgatcagggccgcgcggatgccagacgcggagtgtggcagtgccgtttagccatgaaagcgtggggaaaatattgttatgacccgccaggcgcagggcgcgaacttcacctaaacgttgttctgcttcggcataggtttcgcggtaatagcttgaaactgcgccatcgacccagacattagcatccggtttttcagtaaagaagaaaccgctaccgtgaccgtcctgaccaaattgcagcgcatctttggcggtttcccacaccgggcgggcggtttgtccatcaccgaggcgcttatcgctgccatcatctttcgcccctaatacctgaacggcagaagcatggctgaacagagcatgatactggtcactggcgaactgctctgccgggaatttccagttacagttgatcacccacttttgtacgccgccgacaatttcggtgccgccttcgcgacgatccagcatgccatccagataccaggcaatgtcacccaggtaatcacgcaggcccggtgcgctggtatcccagttgccaaaaattagccctttataactctccacacaaggaacttcgtttagtccccagtgggatttacacaacccttgtgggtaggcgcgaggttccagcggtacatcgatcaactcgccgttaatgccataagaccagccgtgatacgggcaggtaaaggcgcgagtgttgccgcaatctgcataactcacacgcatggcccggtggcggcattggttgagaaacgccttgatgctgccgtctttctgacgcactacgacaaccgcatcttctcccatgtaggtgttaaagaaatcaccgggttttgggatctggctttcgtgggcgagaaatagccagcaacgaccgaaaatacgctcaagctccagttggtaaatatccgggtcggtataaatacgcggagtgacccgaccattttgggtgtcaatcagttggtaaatgttcaaatctgagggtgtggtcatattttttaatcctgaaagataagatgtattgaccttctatttttgtgccataaggatgttgctggttggttgctaatatgtgaaatagttaatttctaccagctgagacgttttttcgataacaaggggaaggtgatggaactacggcatttacgctatttcgtcgcagtggcgcaggcactgaactttacccgtgcggcggaaaaactgcatacctcacagccttcgttaagcagccagatccgcgatcttgaaaactgtgtcggtgttccgttactggtgagggataagcgcaaagtcgcgttgacggcggcgggagaatgttttctccaggacgcgctggcaatcctcgaacaagcggaaaatgccaaattacgggcgcggaaaattgttcaggaagacagacaattaaccattggctttgtgccatcggcggaagtgaatttactgccaaaagtattaccgatgtttcgtctcagacagccagacaccttgattgagctggtgagtttaatcaccacgcaacaggaggaaaaaattcgccgtggtgaactcgacgtcggcttaatgcgccatcctgtttatagcccggagattgattatctggagctttttgacgaaccattagtggttgtgttaccggttgatcaccctttagcacatgaaaaagagatcaccgccgcgcaactggatggcgtgaatttcgtcagtaccgatccggtgtattccggttcgcttgcgccgatcgttaaagcgtggtttgcgcaagaaaacagccagccaaatatcgtccaggtggcaacgaatattctggtgaccatgaatctggtgggcatggggctgggcgtcactttgatacccggttatatgaataattttaataccggacaggttgtttttcgtcccattgccggaaatgtgccttccattgctttactgatggcgtggaagaaaggggagatgaagccggcattacgcgatttcatcgccattgtgcaggaacgtttggcaagcgtaacggcataattacgcattatttttgcaacatgcgtcgcggatctcagttttttagtgcttgtgaactggcgttacagacatcgggaagcaggctcgaatattcttatttttcaacttgcaccaacattcgattaaccccagactaacgcctcctgacgggagggactcatggttttgcaatccacgcgctggttggcgctcggctatttcacatacttttttagttacggcatttttctacctttctggagcgtctggcttaaagggattggtttaacgccagaaaccatcggcctgttattgggggcaggtctggttgcccgtttcctcgggagtttgctcatcgcgccccgcgtcagcgatccttcccgcctgatttccgccttgcgcgtgctggcactgctgacacttctctttgctgtcgccttctgggcgggggcgcacgtagcgtggctgatgctggtgatgattggctttaacctctttttctcaccactggtaccgttgaccgatgcactggcgaatacgtggcaaaagcagttcccgcttgattacggcaaagtgcgactgtggggctcggtggcgtttgtcattggctcggcgctgacgggcaaactggtcactatgtttgattatcgggtgatcctcgcgctgttgacgttgggcgtggcatccatgctgctcggctttctcatccgtccgacgattcagccacaaggggcaagtcgccagcaggagagcaccggttggtctgcgtggttggcgctggttcgccagaactggcgctttctggcctgcgtttgtttattgcagggggcacatgcggcctattacggttttagcgccatttactggcaggcagctggctactcggcctcggcggtggggtatttgtggtcgctgggcgtggtggcggaagtcattatctttgcgctgagtaataaacttttccgccgttgtagtgcacgcgatatgctgttgatctcggcgatttgcggcgtagtgcgctggggcattatgggagcaactacggcgttgccgtggttgatagtggtgcaaattctgcattgcggcaccttcacggtctgccacctggccgccatgcgttatattgctgctcgccagggtagcgaagtcatccgtttacaggcggtttactctgccgtcgcgatgggcggcagtatcgctatcatgaccgttttcgccggtttcctgtatcaatatctgggccacggcgtgttctgggtaatggcgctggtggcgcttccggcaatgtttttgcgcccgaaagttgttccctcatgctgattcgagcattttgcggatctgctcctgttgatgtgttgtcagcgtcaggtccgtatagatcagcggtggtgaaaagagcggtaatggcatggtataaggcgcaataatcagtgccgcgccacgcggagcgcctgtctgcaaaaatgcctttaccgacatatgcttaatgttgagcggcagtaacgttagttcgcgtaactgctgctcaatctgcgcttctcgctcgctatcattcccggtaagaagaataatctgtttttcatgcagatcgttttcctgcattagccaggcaccgaaaatcaccgcgaccagaccactttcctcatcagaaagatggacgccgtattcactttcaaatccggccagcgccgcgcgggtggtgcgcaccaggcgtgggtacagtctggcgaactcttccggcagggtattatcaataccgatggcaaacaaactgcgatttaacgcctgggcgaggtgggtataaagctgatcacataacccctgttcatcataaaaacgaacatttcccagctcacgaaaatggtttaccagacgtttgatagactgacgcaattgtctgtcccgctgatgcgcatcccgcaatggatcgggaacccgcaacatggaaaaaagtagtgccataaacagtggctcatcaggtggtacaggctggagcgcccgacgctgccagtggcgtccaatttcctgcgctacctgaaattcaaggcaggattccgcccagcgacgttggagcggattaaactgaggcgtaattccagcgtggtgctgcagcaaacaatattgcagatacagacacaggaaatgaatatcgcgcgattcaaagcgtttttgcagccgtcgggagcagagattcactaacgcttgtagattggtatcgtcgtaaaagttacgcgcaattccgcgccgcttcagttcactcttcagggcgggggtgaattggctggtaataaatgacggacacagacggaaaccacgtcgtagccagtgaaataaacacaaacgttggttaagcactgtaccttcaacccggtagctaccgtcataaccagtcgtcagtgtgagttgatgatagcgcaggatctcccgtcctgtttcgctgatatcaagactggcaatatcatcatccacaccattaagctcgctgaaggttgccatggtggcggtcaaccccggctgaaagagcgtcagcaagatctggcagcggcgctggggagccgaaaggacagatggtggagcaagcgtaggcatcatctgtagatctcccataagcataattgataagaatagctaaagtttgctcaaggaaatggcgaagggaatgctaatcatcagaaatgttggcaagcgtcacagaatttttctcatcttaaactgttctgaccagaggattagcatgtcttaaggtggttttgtgaatgattatcgtgctagcgatcatgggttagttctgcggattcaacgcgctaaggataaagtccaccatctgttcgcgataaacatcgccgtgacgatcggaaaaagcatcaatgtgttcgccatccgggattaggatcaaccgttttggctcttttgccaggctatacaacttttcgctgtgctgccatgggataacgtgatcagctttaccgtgaatgagtaaaagcgggatcgggctgacgctggcgatataattttcgccgctgtaactctcatcaagtaagtagccactgccggggatcatctggttggcgatggttgcataagaggcaaatgtggagtcgaggatcaccgcacgtatgccttcacgatcaccccgaccaataacatccagaatattcgccccgccaatactctgcccgaacagcaccagacgttgtgggtttacatcactgcgatggcgcaccacattgatggcactttgcgtatcgtccagcaatccggcctgggacggcgtgccttttgatttaccaaacccgcgataatcaaacataaaaacgttgaaattacgctcgggtaaccaactgaccagcggccagtgggcggacatatttccggcattgccgtgagcatgaatgatggttgcgatggcgttgtcagcagggcccgtcgaagaagggataaaccagccttgcagacgagtaccgtccttagccgtaaattcgacggattccgccgaccagggatcgggaccgtaaattttatcgtcgggataatagaagaagttgatggcaacgcgcggcactaaataaacgcagaaggcaacaacaaagagaataaacagaattttgggaacgcgtttgttcactggcagtgccataacctttccttgcgacttctttatcatccattaatcggggaaagatggtgggagagtgacgaaagaaagtaaagcagtgaggaagtatttcggaatagcgcctgaaaggcgagggcgggtgagtgatatcacccgcctgagtcattaacgcttcagagcgtcgcttaactcgtcacgcatgttcgccagcatggctttaacaacgcgcgggttaccagcaacgatgttaccggtcagcatgtagttatgaccaccggtgaagtcgctgacgatgccgcccgcttcacgaaccagcagctcgcctgcggcgaagtcccacgggcgcagaccgatttcaaagaaaccgtcaacacgacccgcagcgacgtaagccagatccagcgccgcagaaccggtacgacggaagtctgcacattcgttgaacagtttgccgacgatgttgatgtaggtagtggcgtactgttttgctttgaacgggaagccggtcgccagaatagtaccgtcgagatcgcgagcggtgctgccgcgcagtcggtagccgttcagctgtgcgccctgaccgcgagtggcggtgaacagttcgttacgcataggatcgtataccacagcaacttcggtgcggcctttgatacgaacagcgatagataccgcgaagtgcggcagacgtttgataaagttggtagtgccatccagtggatcgataacccattgaacatcctgatcagtaccttcaagttcaccgctttcttcggtgatgatggtgtgctgtgggtaagatttacgaatcgtgtcgataatcaccgcttcggcagctttatctacgttggtcacgaaatcgttactgcctttctggctcgcttctacagcgtccggggtttcatagtttttggcaattaaattacccgccttgcgcgctgcgcgcacggcgatgttcagcatcggatgcatcggtctctctcactggatgttaaagaacgggaaaacggcgcagagtatagcagcgagatcggcatctgtcttcgttttatgataagatgcgtgaataatctttagatgaagaaagacaatgctgcaaaatattcgaattgtgctggtggagacgtcacacaccggcaatatgggttctgttgcccgtgccatgaaaacaatgggattaaccaatctgtggctggttaatccactggtgaaacccgactcccaggcgattgccctggcagcaggggccagcgatgtgattggtaatgctcacatcgtcgatacgctcgacgaagcgttagccggttgtagcctggtggtgggcaccagcgcacgttcccgcacgctgccatggccgatgctcgacccgcgcgaatgcggcctgaaaagcgtcgctgaagcggcaaataccccggtggcgctggtgtttggtcgcgagcgcgtcggcttgaccaatgaagagttgcagaaatgccattatcatgtcgcgattgcggctaacccggaatacagctcgctgaacctggcgatggcggttcaggttattgcctatgaagtgcgcatggcctggctggcaactcaggaaaacggcgagcaggtcgagcatgaagagacgccgtatccgctggtcgatgatctggagcgtttttatggtcatctggaacaaacgctgctggcaaccggttttatccgtgaaaaccatccggggcaggtgatgaataaattgcgccgtctgtttacccgtgcgcgcccggaaagccaggagttgaatatcctgcgcgggattctggcttctattgagcagcagaataaaggtaacaaggccgaataacagccgttgcctgatgcgacgcgtaatgcgtcttatcaggcctacagtgaacagaaccgtaggtcggataaggcgttcacgccgcatccgacaacaggtacaaacgccacgataaaaaaatggcactgaaggttaaatacccgactaaatcagtcaagtaaatagttgaccaatttactcgggaatgtcagacttgaccctgctatgcaatacccccacttttacaataaaaaaccccgggcaggggcgagtttgaggtgaagtaagacatgagactgacatctaaagggcgctatgccgtgaccgcaatgcttgacgttgcgctcaactctgaagcgggcccggtaccgttggctgatatttccgaacgtcagggaatttccctttcttatctggaacaactgttttcccgtctgcgtaaaaatggtctggtttccagcgtacgtggaccaggcggtggttatctgttaggcaaagatgccagcagcatcgccgttggcgaagtaattagcgccgttgacgaatctgtagatgccacccgttgtcagggtaaaggcggctgccagggcggcgataaatgcctgacccacgcgctgtggcgtgatttgagcgaccgtctcaccggttttctcaacaacattactttaggcgaactggttaataaccaggaagtgctggatgtgtctggtcgtcagcatactcacgacgcgccacgcacccgcacacaagacgcgatcgacgttaagttacgcgcttaataaaaagaattcagaatcaggccggagtgctaaatactccgtaaacacggtcgtacatccagccggtagcctgattccttgcattgagtgatgtacggagtttatagagcaatgaaattaccgatttatctcgactactccgcaaccacgccggtggacccgcgtgttgccgagaaaatgatgcagtttatgacgatggacggaacctttggtaacccggcctcccgttctcaccgtttcggctggcaggctgaagaagcggtagatatcgcccgtaatcagattgccgatctggtcggcgctgatccgcgtgaaatcgtctttacctctggtgcaaccgaatctgacaacctggcgatcaaaggtgcagccaacttttatcagaaaaaaggcaagcacatcatcaccagcaaaaccgaacacaaagcggtactggatacctgccgtcagctggagcgcgaaggttttgaagtcacctacctggcaccgcagcgtaacggcattatcgacctgaaagaacttgaagcagcgatgcgtgacgacaccatcctcgtgtccatcatgcacgtaaataacgaaatcggcgtggtgcaggatatcgcggctatcggcgaaatgtgccgtgctcgtggcattatctatcacgttgatgcaacccagagcgtgggtaaactgcctatcgacctgagccagttgaaagttgacctgatgtctttctccggtcacaaaatctatggcccgaaaggtatcggtgcgctgtatgtacgtcgtaaaccgcgcgtacgcatcgaagcgcaaatgcacggcggcggtcacgagcgcggtatgcgttccggcactctgcctgttcaccagatcgtcggaatgggcgaggcctatcgcatcgcaaaagaagagatggcgaccgagatggaacgtctgcgcggcctgcgtaaccgtctgtggaacggcatcaaagatatcgaagaagtttacctgaacggtgacctggaacacggtgcgccgaacattctcaacgtcagcttcaactacgttgaaggtgagtcgctgattatggcgctgaaagacctcgcagtttcttcaggttccgcctgtacgtcagcaagcctcgaaccgtcctacgtgctgcgcgcgctggggctgaacgacgagctggcacatagctctatccgtttctctttaggtcgttttactactgaagaagagatcgactacaccatcgagttagttcgtaaatccatcggtcgtctgcgtgacctttctccgctgtgggaaatgtacaagcagggcgtggatctgaacagcatcgaatgggctcatcattaatcggtatcggaatcaggagaatttataatggcttacagcgaaaaagttatcgaccattacgagaatccgcgtaacgtgggttcctttgacaacaacgacgagaacgtcggcagcggcatggtgggggcaccggcctgtggcgacgtgatgaagttgcagattaaagtcaacgatgaaggtatcattgaagacgcgcgttttaaaacttacggctgcggttccgctatcgcttccagctccctggtcaccgaatgggtgaaagggaagtctctcgacgaagcgcaggcgatcaaaaacaccgatattgctgaagaacttgaactgccgccggtgaaaattcactgttctattctggcagaagacgcgatcaaagccgccattgcggactataaaagcaaacgtgaagcaaaataagagttgaggtttggttatgtcgattacactgagcgacagtgcagcagcgcgagtaaatacctttctggctaaccgcggtaaagggtttggcctgcgtctgggcgtgagaacctccgggtgttcaggtatggcttatgtactggaatttgttgacgaaccgacgccggaagacatcgtgtttgaagacaaaggcgtgaaagtcgtggtcgatggcaagagcctgcaatttctggacggtacgcagctggacttcgtaaaagaaggcctgaacgaagggtttaaattcaccaacccgaacgtcaaagatgagtgtggttgcggcgaaagcttccacgtttgatgcgcataccgataaccccaccgtggtcgcctgcgcgtggggtttgttttacctgattcgccgttatcgcggcggatcgcagccctgagaatgttatggattacttcaccctctttggcttgcctgcccgctatcaactcgatacccaggcgctgagcctgcgttttcaggatctacaacgtcagtatcatcctgataaattcgccagcggaagccaggcggaacaactcgccgccgtacagcaatctgcaaccattaaccaggcctggcaaacgctgcgtcatccgttaatgcgcgcggaatatttgctttctttgcacggctttgatctcgccagcgagcagcatactgtgcgcgacaccgcgttcctgatggaacagttggagctgcgcgaagagctggacgagatcgaacaggcgaaagatgaagcgcggctggaaagctttatcaaacgtgtgaaaaagatgtttgatacccgccatcagttgatggttgaacagttagacaacgagacgtgggacgcggcggcggataccgtgcgtaagctgcgttttctcgataaactgcgaagcagtgccgaacaactcgaagaaaaactgctcgatttttaatttctggaagctaaacatggccttattacaaattagtgaacctggtttgagtgctgcgccgcatcagcgtcgtctggcggccggtattgacctgggcacaaccaactcgctggtggcgacagtgcgcagcggtcaggccgaaacgttagccgatcatgaagaccgtcacctgctgccatctgttgttcactatcaacagcaagggcattcggtgggttatgacgcgcgtactaatgcagcgctcgataccgccaacacaattagttctgttaaacgcctgatgggacgctcgctggctgatatccagcaacgctatccgcatctgccttatcaattccaggccagcgaaaacggcctgccgatgattgaaacggcggcggggctgctgaacccggtgcgcgtttctgcggacatcctcaaagcactggcggcgcgggcaactgaagccctggcaggcgagctggatggtgtagttatcaccgttccggcgtactttgacgatgcccagcgtcagggcaccaaagacgcggcgcgtctggcgggccttcacgtcctgcgcttacttaacgaaccgaccgctgcggctatcgcctacgggctggattccggtcaggaaggcgtgatcgccgtttatgacctcggtggcgggacgtttgatatttccattctgcgcttaagtcgcggcgtgtttgaagtgctggcaaccggcggtgattccgcgctcggcggcgatgatttcgaccatctgctggcggattacattcgcgagcaggcgggcattcctgatcgtagcgataaccgcgttcagcgtgaactgctggatgccgccattgcagccaaaatcgcgctgagcgatgcggactccgtgaccgttaacgttgcgggctggcagggcgaaatcagccgtgaacaattcaatgaactgatcgcgccactggtaaaacgaaccttactggcttgtcgtcgcgcgctgaaagacgcgggtgtagaagctgatgaagtgctggaagtggtgatggtgggcggttctactcgcgtgccgctggtgcgtgaacgggtaggcgaatttttcggtcgtccaccgctgacttccatcgacccggataaagtcgtcgctattggcgcggcgattcaggcggatattctggtgggtaacaagccagacagcgaaatgctgttgcttgatgtgatcccactgtcgctgggcctcgaaacgatgggcggcctggtggagaaagtgattccgcgtaataccactattccggtggcccgcgctcaggatttcaccacctttaaagatggtcagacggcgatgtctatccatgtaatgcagggtgagcgcgaactggtgcaggactgccgctcactggcgcgttttgcgctgcgtggtattccggcgctaccggctggcggtgcgcatattcgcgtgacgttccaggtcgatgccgacggtcttttgagcgtgacggcgatggagaaatccaccggcgttgaggcgtctattcaggtcaaaccgtcttacggtctgaccgatagcgaaatcgcttcgatgatcaaagactcaatgagctatgccgagcaggacgtaaaagcccgaatgctggcagaacaaaaagtagaagcggcgcgtgtgctggaaagtctgcacggcgcgctggctgctgatgccgcgctgttaagcgccgcagaacgtcaggtcattgacgatgctgccgctcacctgagtgaagtggcgcagggcgatgatgttgacgccatcgaacaagcgattaaaaacgtagacaaacaaacccaggatttcgccgctcgccgcatggaccagtcggttcgtcgtgcgctgaaaggccattccgtggacgaggtttaatatgccaaagattgttattttgcctcatcaggatctctgccctgatggcgctgttctggaagctaatagcggtgaaaccattctcgacgcagctctgcgtaacggtatcgagattgaacacgcctgtgaaaaatcctgtgcttgcaccacctgccactgcatcgttcgtgaaggttttgactcactgccggaaagctcagagcaggaagacgacatgctggacaaagcctggggactggagccggaaagccgtttaagctgccaggcgcgcgttaccgacgaagatttagtagtcgaaatcccgcgttacactatcaaccatgcgcgtgagcattaacagaggttagtatgggacttaagtggaccgatagccgcgaaattggcgaagcactgtacgatgcgtatcccgatcttgatccgaaaacggttcgattcaccgatatgcatcagtggatttgcgatctggaagatttcgacgacgacccgcaggcatccaacgagaaaatcctcgaagcgattttgttagtctggctggacgaggccgaataatttccgcgtcatgcttcacgccgcagatgcgttggctgcgctcgttcaccccagtcacatagttatctatgctcctggggcttcactcacttgccgccttcctgcaacgcgaatcatttagcggaaaaatcctggggctgccaactggcggcccttttacaaagaaggataactaaaatgacagaagcgatgaagattaccctctctacccaacctgccgacgcgcgctggggagaaaaagcaacttacagcattaataatgacggcattaccctgcatttgaacggggcagacgatctggggctgatcaagcgtgcggcgcgcaagattgacggtctgggcatcaagcatgttcagttaagcggtgaaggctgggatgcggatcgctgctgggcattctggcaaggttacaaagccccgaaaggcacgcgtaaagtggtgtggccggatctggacgatgcccagcgccaggaactggataaccgcctgatgatcatcgactgggtgcgtgacaccatcaacgcaccggcagaagaattgggaccatcgcaactggcacagcgtgctgttgatctgatcagcaacgtcgcgggcgatcgtgtgacttatcggatcaccaaaggcgaagatctgcgtgagcaaggttatatggggctgcacacagtcggacgcggttcagaacgttctccggtattgctggcgctggattacaacccaactggcgataaagaagcgccagtgtacgcgtgcctggtaggtaaaggtatcacttttgactccggcggctacagcatcaaacagactgcgtttatggactcgatgaagtcggacatgggcggcgcggcaacggttaccggggcgctggcatttgccattacgcgcggactgaacaagcgcgtgaagctgttcctctgctgtgcggataacctgattagcggcaatgcgttcaagctgggcgatatcatcacctatcgcaacggtaaaaaagttgaagtgatgaacactgatgccgaagggcgtctggtgcttgccgatggtctgattgatgccagtgcgcagaaaccggaaatgatcattgatgcggcgaccctcaccggggcggcgaaaactgcgctgggtaatgattatcacgcgctgttcagttttgacgatgcgctggccggtcgcttgctggcgagtgccgcgcaggagaacgaaccgttctggcgtctgccgctggcggagttccaccgcagccagctgccgtctaactttgccgaactgaacaataccggaagcgcggcgtatccggcaggcgcgagcacggcggcgggcttcctgtcgcactttgttgagaactatcagcaaggctggctgcatatcgactgctcggcgacttaccgtaaagcgccggttgaacagtggtctgcgggcgctacgggacttggtgtgcgcacgatagctaatctgttaacggcgtaaactaatatgccggatgcggcgtaaacgccttatccggcctacaaattctgcaaattcaacaaattgcgaatcccttgtaggcctgataagcgtagcgcatcaggcatttgcgccccgaacgttgaatgaattgtggttcttatgtccgaaacaaaaaacgaacttgaagacctgctggaaaaagcagcaactgaaccggcgcaccgcccggcctttttccgtactctactggaatccaccgtctgggtgcctggtacggcggcgcagggcgaggctgtggttgaagatagcgcgcttgatttacagcactgggaaaaagaagacggcaccagcgtcattccttttttcacctcgttagaagcacttcaacaggcggttgaagacgaacaggcatttgtcgtaatgcccgttcgcacgctgtttgagatgacacttggcgaaacgctcttccttaatgccaaactgccaaccggtaaagaatttatgccgcgtgaaatcagtttgttgattggtgaagagggaaatccgctgagcagccaggaaatcctggaaggcggtgaatcgctgatattatcggaagtcgcagagccgccagcacaaatgattgattcactcaccaccttatttaaaaccattaagccggtgaagcgtgcttttatttgttcaattaaagagaacgaagaggcacagcctaatttacttattggcattgaagccgatggtgatatcgaagaaattattcaggcgacgggaagtgtagcgaccgatacattacctggcgatgaaccaatcgatatttgtcaggtgaaaaaaggggaaaaaggaattagccactttattaccgaacatattgcgccattctatgaacgtcgctggggtggttttttgcgtgactttaaacagaatcggataatctaaaatatgccgcccaaagggcggcattcgggcttacttgctgctctgaaggttgttaaccaccagtaaattgtcgccggagagactccggttattatttacctcggttaacagcgcaccagaaacaataagtacgatacaaaagcaccgtatcttcattgtgcggtccatgcgaagaccgcatcacgacagcaccactggcgatattgccgcgatagcaagcgctgtgaaacacctgcatttacggccacggaacatcctttcctaaagccagcgcccgtttgcgagacggcggaaagggccgcagtggataatacactaacagaacaataataactctcttttgcttgacaaaaagagagttactggcgagtattgtctccgctgagacgcgcttgcattactacggtaatacaacctgctggaaaggccgcgaaccggaccagcaacaaaaaaccgcctgattttggcggttttttgttttttaaaggaaagtgaatttacatgtttaagtaatatcttttaccggttagaatttttaattttgagcaggatttgtttatatttgtctgaattcggactaataagccaggttattttattaccgaacacggcggaaagggccggtgtcgataatacgctaaataaacaataattactctcttttgcttgacaaaaagagagttactggtgagtattgttttgctgtgaagcacctgcgttgctcatgtaacacaagtcaacctgctggaaaggccgcgaaccagactagcaataaaaaaccgccaaattcggcggttttttattgcctgtaaaatacttatttcactggctcaaccggtaaatctgcccgcgcgccccattcactccatgcgccgtcgtacagtttcacgtttggcacatccagcgtcgcgagtgctaacaaaaccacggctgccgttacaccagagccgcagctgacgataattggtttgtcgtagctgacgccgcgaccaaaaaatatcgcatccagttcatcggtcgtttttagttcgccttcgcgcaccagttccgtccacggaacattcagtgctccgggaatatgtccgcgacgtaaacctgggcgaggttcatcaacttctgcgttaaaacgtgcagccgggcgggcatcaataatttgcgccgtattttcatggcttgccaataatacatcggttactttcaccacggcttcaggattaaacgcggcgttaaactctccttccggcagctctactgcaccttcttctaacagcagatcatcgcgctgccagcctgcaagtccaccccccagaatcgacactttctctacaccaaaggtgcgcagcatccaccatgctcgtggggctgagaaaagattaccttcgtcatagacaatcaggtgcttatcctggttaacgcctaattcacgcatcgccacggcgaacgtttccgggcgcggcagcatgtgcggaagcggggaagtgtgatcagaaagcgcttcgatatcaaaaaacactgcgccgggaatatgtccattcagatactcctgagcaacgttacgatcctcctgtccaggcgacgccatgcgggcatcgataatctgaatttccgggtcatcaatatgttcggcgagccagtcggctcctacaaaccatgtcgtggacataggcatctccatttttgccggggttaggctaaattgtcggatgtttagtgaaaagcgacaagcaaaagaggctgatttggctgtctgagccacaattctcactaaaattcggattgtatgggcgtgatactgaattacataacgtaaattctcacgcataataattattcgacgttgctaacgggccattgtggcagggatgaaaaatgaaaaagttacgcgtagccgcctgcatgctaatgctggcgctggcagggtgcgacaacaacgataacgcgccaacagcggtgaaaaaagatgcgccttctgaagttactaaagcggcctcttcagaaaacgcgagttcagcaaaactctccgtgccggagagacaaaaactggcccaacagagtgccggtaaggtgctgacattgctggatctctctgaagtccaacttgatggtgcagccacgctggtgctgacgttctccatccctctcgacccggatcaggatttctcacgcgttattcatgtcgtcgataaaaaaagcggcaaagtggatggtgcctgggagctgtcagataatcttaaagagttacgtttacgccacctcgaaccgaaacgtgatttgatcgttactattggcaaggaggtcaaagcactcaacaacgcaaccttcagtaaagattacgaaaaaactataactacccgcgacatccaacccagcgtcggttttgccagccgtggttcgctgctgcctggcaaagtcgttgaagggctgccggtaatggcgctcaacgttaataatgtcgatgttaacttcttccgcgttaagccagaatctctgccagcattcattagccaatgggaataccgcaattcgctggcgaactggcagtcagacaaactgctgcagatggcggatctggtctacaccggacggtttgatctcaatcctgcgcgtaacacccgtgaaaaattattgctgccgctgggcgatatcaaaccgcttcagcaggcgggcgtgtatctggctgtgatgaatcaggctggacgttacgattacagtaatcccgcgacgctgtttacgttaagtgatatcggcgtttcagctcaccgttatcacaatcgtctggatatctttacccaaagtctggaaaacggcgcggcccagcaaggaattgaagtctctttattaaatgagaaagggcagactctgactcaggcaaccagtgacgctcaggggcatgtgcagctggaaaatgataaaaacgcggcattactgttggcgcgtaaagacggtcagacaacgctactcgatttaaaacttccggcgctggacttagcagaatttaacattgctggcgcgccaggctatagcaaacagtttttcatgtttggcccacgcgatctttatcgcccaggtgaaacggtaatcctcaatggtttgctgcgtgatgcagacggtaaagcgttgcccaatcaacccatcaagttagacgtgattaaacccgatgggcaggtactcaggagcgtcgttagtcagccggagaatggcctctaccactttacctggccactcgatagcaatgcggcaaccggtatgtggcatattcgcgctaacacgggcgataatcagtatcggatgtgggatttccacgtcgaagattttatgccagagcgcatggcgctgaatctgaccggtgagaaaaccccgctaacgccgaaagatgaagtgaaattctccgtggtggggtactacctgtatggtgcacctgctaatggtaatactttgcaagggcaacttttcctgcgcccactgcgtgaagctgtgtcagccttacctggttttgaattcggcgatatagctgccgaaaatctttcccgcacgctggatgaagttcagttgacgctggatgataaagggcgcggcgaagtttctacagaaagccagtggaaggaaacgcattccccattacaggttattttccagggtagtttgctggaatcgggcggtcgcccggtgacgcgccgcgctgagcaggctatctggcctgccgatgcattgccggggatccgtccgcagttcgcctcgaaatcggtttacgattatcgtactgacagcacggtgaaacagcccattgttgatgaaggcagtaacgccgcttttgacatcgtttatagcgatgcgcaaggcgtgaaaaaagccgtgtcgggcttgcaggtgcgcctgattcgcgaacgccgcgattactactggaactggtcagaagatgaaggctggcagtcacagtttgatcaaaaagatctgatcgaaaatgaacaaactctggatctgaaagcggacgaaaccggcaaggtcagttttccggtagagtggggcgcttatcgtctggaagtcaaagcgccgaatgaagcggtcagtagtgttcgtttctgggctggctatagctggcaggacaacagcgacggtagcggcgcagtgcgacccgaccgtgtcacgctgaaactggataaagccagttatcgccctggcgacaccattaagttgcatatcgccgcgccaacggcgggtaaaggttatgcgatggtcgagtccagtgaagggccgctgtggtggcaagagattgatgttcgggctcaagggctggatctgacgattccggtcgataaaacctggaatcgtcatgatctgtatttaagtacgctggtggtacgtcctggcgataaatctcgctccgcgacgccaaaacgcgcggttggtgtgttgcatctgccgcttggcgatgaaaaccgtcgcctcgatctggcgctggaaacaccagcaaaaatgcgtcccaatcaaccattaaccgtgaaaattaaagccagcactaaaaatggcgagaagcctaaacaggtgaatgtgctggtgtctgccgttgatagtggtgtgctgaatattactgactacgtcacgccagatccgtggcaggcgttctttgatcagaaacgctatggcgcagacatttacgatatttacggtcaggttattgaaggtcaggggcgtctggcagctctgcgtttcggtggcgatggtgatgagctgaaacgtggtggtaaaccgccggtcaatcacgtcaatattgtcgtgcagcaggcgctgccggtaacgctcaacgaacagggcgaaggctcggttacactgccgattggcgattttaacggtgaattgcgcgtcatggcgcaagcctggacggcagatgacttcggtagcaacgaaagtaaagtgatagttgccgcaccggtgattgctgaactgaacatgccgcgctttatggcgagtggcgatacctcgcgtctgacgctggatatcactaatcttaccgataaaccgcaaaaactgaacgttgccctgaccgccagtggtttgcttgaactggtcagcgattcacccgcagccgttgaattagcgccaggtgtgcgtactacgctgtttatcccggtgcgagcattgccgggttatggcgatggagaaattcaggccaccattagcgggttagcgttaccgggtgaaaccgttgccgatcagcataagcagtggaaaatcggcgtccgtccggcgttcccggcacaaacggttaattacggtacggcgttacagcctggtgagacatgggcgattccggcggatggattgcaaaacttctcgcctgttacgctggaagggcaattgttgttgagcggcaaaccaccgctgaacatcgcacgttatatcaaagagttaaaagcgtatccgtacggctgtcttgagcaaaccgccagcggcctgtttccgtcactttataccaacgcagcccaactgcaggcgttgggcatcaaaggcgacagtgatgagaaacgccgtgcatcggtcgatatcggcatttcccgtttgctgcaaatgcaacgtgataacggcggctttgcgctgtgggataaaaacggtgacgaagagtactggctgacggcttacgtgatggatttcctggtccgcgcaggcgaacagggttacagcgtgccgacagacgccattaaccggggtaatgagcgtctgctgcgctatttacaagatccgggcatgatgtcgatcccgtacgcggataatctcaaagccagtaaattcgccgtacagtcttacgctgcgctggtgttggcccgtcagcaaaaggctccgctgggtgcgctgcgtgaaatctgggagcatcgtgcagatgccgcttctggtttaccgctgctgcaacttggcgttgcgctgaaaaccatgggtgatgcgacgcgtggtgaagaagcgattgcgctggcgctgaaaacgccgcgtaatagtgatgagcggatatggctgggtgattacggtagttcactgcgcgacaacgcgttaatgctctccttgctggaagaaaataaactgctacccgatgagcagtacactttgctgaacacactttcgcagcaggcgtttggtgaacgctggctatcgacgcaggaaagtaacgcgttgttcctggctgcccgtacgattcaggatttacccggtaaatggcaggcgcaaacctctttctcagctgagcagctgacaggcgagaaagcgcaaaacagcaatctgaatagcgatcaacttgtcaccttgcaggtgagcaacagtggcgatcagccgttatggttgcgtatggatgccagcggttatccgcaatccgcacctttaccggcgaacaatgtgctgcaaatcgagcgtcatattcttggtactgatggtaagagcaaatcgctggactcgttacgtagcggcgatctggtgctggtgtggttgcaggtaaaagccagtaacagcgtgccggatgcgttagtcgtggatctgctgcctgcgggtctggaactggaaaaccagaatctggcgaacggtagcgccagcctggagcaaagtggtggcgaagtgcagaacttactgaaccagatgcagcaggcgagcattaagcacattgagttccgtgacgatcgctttgtggcggcggttgccgttgatgaataccaaccggtaacgctggtgtatctggcgcgggcggtgacgccgggaacgtatcaggtaccgcaaccgatggtggaatcaatgtatgttccccaatggcgggcgaccggcgcggctgaagatctgctgattgtcagaccgtaaatgcctcgcttgttaaccaaacgcggctgctggataacgttggcagccgcgccctttctcctttttcttgcagcgtggggagcagataaactctggcctctaccgctgcatgaagtcaatcccgcacgagtggtcgtggcgcaggatggtacgccgctctggcgcttcgccgatgctgacggcatctggcgttatccggtaacaatcgaagatgtttctccacgttaccttgaagcgctgatcaattatgaagatcgctggttctggaagcatccgggggtgaatccattctcggtggcgcgcgcagcatggcaagatctcacttcgggacgggttatttccggtggcagcacgctcactatgcaggttgctcgtctgcttgatcctcaccccaaaacatttggcggcaaaattcgccagctctggcgcgcgttgcaactggaatggcatctgtctaagcgtgaaattctgaccttgtatcttaaccgcgctccgtttggcggtacgttgcaggggatcggtgcggcaagttgggcttatctcggaaaatcgcctgcgaatttaagctattccgaggcggcaatgctggcggttttgccgcaagcgcccagccgtcttcgcccggatcgttggccggagcgtgccgaagccgcgcgtaataaagtgctcgaacggatggccgtgcaaggtgtgtggtcccgtgagcaggtaaaagagtcaagggaagaacccatctggctggccccccgacaaatgccgcaactggcaccgctgttttcgcgcatgatgctcggtaaaagcaaaagcgacaaaatcactactacgttggatgccggtcttcaacgacgtctggaagaactggcgcaaaactggaaagggcggttgccaccgcgcagctcactggcgatgatcgtggttgatcataccgatatgcgtgttcgcggctgggtgggatcggttgatctcaacgatgattcacgctttggtcatgttgatatggtcaattcgatccgatcgccaggatcagtgctcaaaccgtttgtttatggtctggcgctggatgaaggcttgatccacccggcatcactgctgcaagacgtcccccggcgcaccggtgattatcgaccaggtaactttgatagcggttttcatggcccgatcagcatgagcgaggcgctggtgcgctcgctgaacttacctgctgtgcaggtgctggaagcctatggaccgaaacggtttgcggcaaagttacgcaatgttggattgccgttatatttgcccaacggtgctgcgccgaatctttcactcattctcggcggcgctggtgcaaaactggaagatatggcggcagcgtataccgcgtttgctcgccacggcaaggcaggcaaattgcgcttacagcctgacgatccgctgcttgaacggcctttaatgtcgtcgggggcggcgtggatcattcgccggattatggctgatgaagcgcaacccttgccggatagtgccttgccgcgcgtcgccccactggcatggaaaacgggcaccagctatggctatcgtgacgcctgggcgattggggttaacgctcgctatgtcattgggatctggactggcagaccggacggcacgcccgttgttggtcagtttggctttgccagtgccgtaccattgttgaatcaggtcaataatatcttactgtcgcgcagtgcgaatctgccggaagacccgcgcccgaactcagtcactcgtggcgttatctgctggccgggcggacagtctttgccggaaggtgacggtaactgtcgccgccgcctggcaacctggctgctggacgggagtcagccgccaactctattactgccggagcaggaaggcattaatggcattcgtttccccatctggctggatgaaaatggcaaacgtgttgccgctgattgcccgcaagcgcgacaagaaatgataaatgtctggccgctaccgctggaaccctggctgcccgcatcagaacgtcgcgctgtgcgcttaccaccggcctcgacaagttgcccgccatacggtcacgatgcccagctcccgctgcagctgacaggcgttcgcgatggcgcgattattaaacgtttaccgggcgcagcggaagcgactttgccgttgcaatcaagtggaggggcaggtgaacgctggtggtttctgaatggcgaaccgttaactgaacgcgggcgcaacgtgaccctgcatttgacggataaaggtgattatcaattgctggtgatggatgacgtggggcaaatcgcgacagtgaaatttgtcatgcaatagtctgttttgtccctgattgttgctaaaactcattttattttaaaaaaatgttaccttcatcaatagtcaacggccctgttgctcattataatccgcgccatctcgtacgctggtacagacaacaacagaacaatttacagaggtaaaaatggctattgaacgtactttttccatcatcaaaccgaacgcggtagcaaaaaacgtcattggtaatatctttgcgcgctttgaagctgcagggttcaaaattgttggcaccaaaatgctgcacctgaccgttgaacaggcacgtggcttttatgctgaacacgatggaaaaccgttctttgatggtctggttgaattcatgacctctggcccgatcgtggtttccgtgctggaaggtgaaaacgccgttcagcgtcaccgcgatctgctgggcgcgaccaatccggcaaacgcactggctggtactctgcgcgctgattacgctgacagcctgaccgaaaacggtacccacggttctgattccgtcgaatctgccgctcgcgaaatcgcttatttctttggcgaaggcgaagtgtgcccgcgcacccgttaataatttcgtaaatgccgcgtgcaaacgtggcatccgtgcgccagaatttgtacaatgcagcgcccccggacgagcagccgctcaccggggcgtttcttttttcaaccctccaggggccataacgtgtaataacgaggccggaatagcatatgtctgaacaattagtcacacctgaaaacgtcaccacgaaagatggaaaaatcaacctgctggatctcaaccgtcagcagatgcgggagttttttaaagatttaggtgaaaaacccttccgcgccgatcaggtgatgaagtggatgtatcactattgctgcgacaactttgatgagatgaccgacatcaacaaagtgttgcgcggcaaactgaaagaggtggcggaaatccgcgcaccggaagtggttgaagaacagcgttcatctgacggcaccattaaatgggcgatcgccgttggcgatcagcgcgtcgaaacggtgtatatcccggaagacgaccgtgccacgctctgcgtctcttcgcaggtggggtgtgcgctggagtgtaaattctgttccaccgcccagcagggctttaaccgcaacctgcgggtgtcggaaattatcggccaggtgtggcgtgcggcgaaaatcgtcggcgcagcaaaagtcaccggtcagcgtccgatcactaacgtagtgatgatgggcatgggcgagccgctgctcaacctgaacaacgtcgttccggcgatggaaatcatgcttgatgatttcggttttggcctgtctaaacgtcgcgtcacgctttccacttccggtgtagttccggcgctggataaactgggcgatatgatcgacgttgcactggcaatttccctgcacgcgccgaacgacgaaattcgtgacgaaattgtgccgatcaacaaaaagtacaatatcgaaacgttccttgctgcggtgcgccgttatctggagaaatccaacgccaatcagggccgagtcactattgaatacgtgatgcttgaccacgttaacgacggcactgaacacgcgcaccaactggcggaactgctgaaagatacgccgtgtaagatcaacctgatcccgtggaacccgttcccgggtgcgccgtatggacgcagctcgaacagccgtatcgaccgtttctcaaaagtgctgatgagctacggtttcaccactattgtgcgtaaaactcgtggtgatgatatcgatgctgcctgtggtcagttggcgggcgatgttatcgaccgtacgaaacgtaccctgcgtaaacggatgcagggtgaagccatcgacattaaagcggtctgatagccattacgccacggttactttatgtaccgtggcgtaatgttttatgaatgaagtattaagttgcaattgtctggtcaatattaacggtgcgtttttgctgactttaaggcagtatgtaacgatgcaacagtaagttagccttagtgaatgtgggctttgtcacgagcacacagacggtcttatactgtatgataacggttaacttaacggatgtttcgcggtgtgggtgagcatgatggttcaccggcatctcaattctcatttaaacgtacctgcagcgaatgaatactgaagccacgcacgaccaaaatgaagcacttactaccggcgctcgcctgcgtaatgctcgcgaacaactaggacttagtcagcaggccgttgccgagcgactttgcctgaaggtttccacggtacgcgacattgaagaagataaggcacccgccgatcttgcttcaacattcctgcgcggatatatccgctcttatgcgcgtctggtacatattccagaagaagaactgctgccagggctggaaaagcaggctccacttcgggctgcaaaagttgcgccgatgcagagtttttccctcggtaaacgccgcaaaaaacgcgacggctggctgatgaccttcacttggctggtgttgtttgtggttatcggcctgagcggtgcctggtggtggcaagaccacaaagctcagcaggaagagatcaccactatggccgatcaatcttcggcggaactgagcagtaatagcgagcaggggcagagtgttccattaaatacgtcgacaactacagacccggctacaacgtccacgccgccagcgtctgtggatactaccgcaaccaacacgcaaacacctgccgtaactgcgccagcaccagctgttgatccgcaacagaatgcggttgtttcgccttcgcaggcaaatgttgataccgccgcgaccccggcaccaacggcagcaacaacgccagatggtgctgcgccgttgccaaccgatcaggctggcgtgaccacgccggtggctgatccgaatgcgctggtgatgaactttactgccgattgctggctggaggtcactgatgctaccggtaaaaaattgtttagcggtatgcagcgtaaagacggtaatttgaacttaaccggccaggcaccgtacaaactgaaaattggtgcgccagccgcagtacagatccagtatcaagggaaacctgtcgatctgagtcgttttatcagaactaaccaggttgcgcgtctgaccctcaatgccgaacaatcaccggcgcagtaacagacgggtaacgcgggagatttttcatgcataaccaggctccaattcaacgtagaaaatcaacacgtatttacgttgggaatgtgccgattggcgatggtgctcccatcgccgtacagtccatgaccaatacgcgtacgacagacgtcgaagcaacggtcaatcaaatcaaggcgctggaacgcgttggcgctgatatcgtccgtgtatccgtaccgacgatggacgcggcagaagcgttcaaactcatcaaacagcaggttaacgtgccgctggtggctgacatccacttcgactatcgcattgcgctgaaagtagcggaatacggcgtcgattgtctgcgtattaaccctggcaatatcggtaatgaagagcgtattcgcatggtggttgactgtgcgcgcgataaaaacattccgatccgtattggcgttaacgccggatcgctggaaaaagatctgcaagaaaagtatggcgaaccgacgccgcaggcgttgctggaatctgccatgcgtcatgttgatcatctcgatcgcctgaacttcgatcagttcaaagtcagcgtgaaagcgtctgacgtcttcctcgctgttgagtcttatcgtttgctggcaaaacagatcgatcagccgttgcatctggggatcaccgaagccggtggtgcgcgcagcggggcagtaaaatccgccattggtttaggtctgctgctgtctgaaggcatcggcgacacgctgcgcgtatcgctggcggccgatccggtcgaagagatcaaagtcggtttcgatattttgaaatcgctgcgtatccgttcgcgagggatcaacttcatcgcctgcccgacctgttcgcgtcaggaatttgatgttatcggtacggttaacgcgctggagcaacgcctggaagatatcatcactccgatggacgtttcgattatcggctgcgtggtgaatggcccaggtgaggcgctggtttctacactcggcgtcaccggcggcaacaagaaaagcggcctctatgaagatggcgtgcgcaaagaccgtctggacaacaacgatatgatcgaccagctggaagcacgcattcgtgcgaaagccagtcagctggacgaagcgcgtcgaattgacgttcagcaggttgaaaaataataacgtgatgggaagcgcctcgcttcccgtgtatgattgaacccgcatggctcccgaaacattgagggaagcgttgagggttcatttttatattcagaaagagaataaacgtggcaaaaaacattcaagccattcgcggcatgaacgattacctgcctggcgaaacggccatctggcagcgcattgaaggcacactgaaaaacgtgctcggcagctacggttacagtgaaatccgcttgccgattgtagagcagaccccgctattcaaacgtgcgattggtgaagtcaccgacgtggttgaaaaagagatgtacacctttgaggatcgcaatggcgacagcctgactctgcgccctgaagggacggcgggctgtgtacgcgccggcatcgagcatggtcttctgtacaatcaggaacagcgtctgtggtatatcgggccgatgttccgtcacgagcgtccgcagaaagggcgttatcgtcagttccatcagttgggctgcgaagttttcggtctgcaaggtccggatatcgacgctgaactgattatgctcactgcccgctggtggcgcgcgctgggtatttccgagcacgtaactcttgagctgaactctatcggttcgctggaagcacgcgccaattaccgcgatgcgctggtggcattccttgagcagcataaagaaaagctggacgaagactgcaaacgccgcatgtacactaacccgctgcgcgtgctggattcaaaaaatccggaagtgcaggcgcttctcaacgacgctccggcattaggtgactatctggacgaggaatctcgtgagcattttgccggtctgtgcaaactgctggagagcgcggggatcgcttacaccgtaaaccagcgtctggtgcgtggtctggattactacaaccgtaccgttttcgagtgggtgactaacagtctcggctcccagggcaccgtgtgtgcaggcggtcgttatgacggtcttgtggaacaactgggcggtcgtgcaacaccggctgtcggttttgcgatgggcctcgaacgtcttgtattgttagtacaggccgttaatccggaatttaaagccgatcctgttgtcgatatatacctggtggcttcaggtgctgatacacaatctgcggctatggcattagctgagcgtctgcgtgatgaattaccgggcgtgaaattgatgaccaaccacggcggcggcaactttaagaaacagtttgcccgtgctgataaatggggtgcccgcgttgctgtggtgctgggtgagtctgaagtggctaacggcacagcagtagtgaaggatttgcgctctggtgagcaaacggcagttgcgcaggatagcgtagccgcgcatttgcgcacgttactgggttaaggaaggagaaggacagcgtggaaatttacgagaacgaaaacgaccaggtagaagcggttaaacgcttttttgctgaaaatggcaaagcactggctgttggggtgattttgggcgttggcgcactgattggctggcgctactggaacagccatcaggttgattctgcacgctccgcttctcttgcctatcaaaatgcggttaccgcagtgagcgaaggcaaaccggatagcatcccggcggcggaaaaatttgctgctgaaaataaaaatacttatggtgcgctggcttctttggaacttgcgcagcaatttgttgacaaaaatgaactagagaaagctgccgcccagttacaacaggggctggcagacacgagcgatgaaaatctcaaagccgtgataaatctgcgtcttgctcgcgttcaggtacagctcaagcaggctgatgccgcgctgaaaacccttgataccatcaaaggtgaagggtgggctgccattgttgccgacctgcgtggtgaagcattgctgagcaaaggtgataagcaaggtgcgcgtagtgcatgggaagcaggcgtgaaaagcgatgttactccggcactgagcgaaatgatgcagatgaaaattaataatttgtccatctgagagggacccgatgcaattgcgtaaattactgctgccaggactgctttccgttacccttttaagcggctgttcgctgtttaacagcgaagaagatgtggtaaagatgtccccattgccaaccgttgaaaaccagtttacgccgaccacggcgtggagcacttccgttggtagcggcattggcaacttctattccaatcttcatccggcactggcggacaacgttgtctatgcagcggaccgcgctggtttagtaaaagcgctgaatgcggatgatggcaaagaaatctggtctgtcagcctggccgagaaagatggctggttctctaaagagcctgcattactttctggcggtgtgaccgtgtctggtgggcatgtctacattggcagcgaaaaggcgcaggtttacgcgctgaataccagcgatggtactgtggcatggcaaactaaagtcgcgggtgaagcactttcgcgcccggtggtcagcgacggtctggtgttaatccacaccagtaacggtcagttacaagcgctgaacgaagctgacggcgctgtcaaatggacagttaacctcgatatgccttcgctctctttgcgtggcgagtctgcgccggcaacggcttttggtgcggccgtcgtggggggcgataatggtcgcgtcagcgcagtgctgatggaacagggccagatgatttggcagcagcgtatttcccaggcgaccggttctaccgaaattgaccgtctgagcgatgttgacacgactcccgtcgttgttaacggcgttgttttcgcgctggcctataatggtaacctgacggcgcttgatctgcgcagtggtcagattatgtggaaacgcgaactgggttcggtgaatgatttcatcgtcgacggcaatcgcatctatctggtcgatcaaaatgaccgggtgatggcgttgaccattgatggcggcgttacgctgtggacacaaagcgatctgctgcatcgcctgctgacttctccggtgctgtataatggcaacctggtggtcggtgacagtgaaggttatctgcactggattaacgtcgaagatggtcgtttcgttgcccagcaaaaagttgatagttccggtttccagactgaaccggttgccgctgacggcaaactgctgatccaggcaaaagacggaaccgtgtactctattacacgttaatcgtctctgtcgttcactttgaaaacggctcctggacaggggccgttttcctgtttttaacaacgacgcgaatatagcgtgcgttgtctgatgatttataaaaatgaggctttaaacatggtacctgtggtcgcgcttgtcgggcgccctaacgtaggaaaatccacgttatttaaccgtctaactcgcacccgagatgcgctggttgcggatttcccgggtctgactcgtgaccgtaagtacggtcgtgcggaaattgaaggccgtgagtttatctgtattgataccggcgggattgatggcacagaagacggtgtagaaacccgcatggcggaacagtcgctgctggcgattgaagaagcggacgtcgtactgtttatggtggatgcgcgcgcgggcctgatgccggcagatgaagcgattgccaaacatctgcgctcccgtgaaaaaccgaccttcctggtggcaaacaaaactgacggtctggatcccgatcaggcagtggttgatttctactcgcttggtttaggtgaaatctacccgatcgccgcgtctcacggtcgtggcgtattaagtctgctggagcatgtgctgctgccgtggatggaagatctcgcaccgcaagaggaagtcgacgaagacgctgaatactgggcgcaatttgaagcggaagagaacggcgaagaagaagaggaagacgacttcgacccgcaaagtctgccgatcaaactggcgattgtgggtcgtccgaacgtaggtaagtctacactcactaaccgtattcttggtgaagagcgcgttgttgtttacgacatgcctggcacgacgcgtgacagcatctacatcccaatggaacgcgatggacgtgagtatgtgctcattgacaccgctggcgtacgtaaacgcggcaaaatcaccgatgctgtagagaaattctccgtaatcaaaacgttgcaggccattgaagacgccaacgtggtgatgttagtgattgatgcgcgcgaaggtatttccgatcaggatctctcgctgctgggctttattctcaatagtgggcgctcacttgtcattgtggtgaataagtgggatggcctgagtcaggaagtgaaagagcaggtgaaagaaacgctggacttccgtctgggctttatcgattttgctcgtgtgcactttatctctgccttgcacggcagtggtgttggtaacttgtttgaatcagtacgtgaagcgtatgacagctccacccgtcgtgtggggacctctatgctgacgcgcatcatgacgatggctgttgaagatcaccaaccgccgctggtacgcggtcgtcgtgtgaagctgaaatatgcccacgccggtggttataacccgccgattgtggtgattcacggtaatcaggtgaaagacctgcctgattcctacaagcgctacttgatgaactacttccgcaaatcgctggacgtaatgggatcgccgattcgtattcagttcaaagaaggggaaaacccgtatgcgaataagcgtaacaccctgacgccaacccagatgcgtaaacgtaagcgtctgatgaagcacatcaagaaaaataaataattatccgtaagtattttatctgccattccctctatgaatgtagagggaatggctaccggaggaattcatatggaactgcattgtccacaatgtcagcatgtgcttgatcaggataacggccatgcgcgttgccgatcctgcggggaatttattgaaatgaaagctctttgtccagactgccatcaaccgttgcaggtgttaaaagcctgtggtgcagtagattacttctgtcagcacgggcatggcttgatatcgaaaaaacgcgttgaattcgtgctggcttaatgcacctttttacgcgatttttttactggctggatgttttttacttcactttctatccagccgtcttccagacgtgtggttagcatttcacccgctttaacttgcttcacttttttcagtacattgccgtcagtagcagtagtaacgctgtatccacgcgccagcgttgacagtgggcttacggcttcgaggtgcgttactgcattaccgaaacgttcacgcgtggcgctaagctgtgcgcgcagggtttctgctaaacgatattccagttgctgaatgcgcgtttgcgcgcgatgaatcttcggctgtggattttgctgattcagccgctgtgttaaccgctgctgctgttgcccggtacgcttaagttgattttccagcgcaaagctcattcgcttttgcaggcgctcaagcatggtttgctggcgtgccagccggagctgcggatgctgttgctgtaatcggtgatgaatttgcgtaaagcgacgtgtgcggttggcgagataataatccatcgccatctccagccgttgacgggtcgattgcacctggcgcagtaactcttgctgattacggctcactacttcagcggcggcagacggcgttggcgcacgcagatcggcaacaaaatcggcaatggtcacatccgtctcatgcccgacggcgctgacaaccggaatgcggctggtaaaaatcgcccgcgctacgcgttcgtcgttaaaactccataaatcttccagcgaaccgccgccgcgcccgacgatcaatacgtcgcactcattgcgctgattcgccagttcaatggcgcgaacaatttgccccggcgcgtcatcgccctgaacggcggcagggtagatgatcaccggcagagaaggatcgcgacgttttaacacatgcaaaatatcatgtagcgcagcaccggtttttgaggtgatcacaccaacgcaatgcgcaggggagggaagtggttttttgtattgctgatcgaacaaaccttcagcctgcaacttcgctttgagctgttcgtacttctgttgcagcagcccttcaccggccggctgcatactctcaacgattatctggtagtcgccgcgcggctcgtagagcgtaatattggcgcgaactaaaacttgttgcccatgctgtgggcggaaggtcacccggcggttgctgttgcggaacatcgcgcagcgtacctgggcggtgtcgtctttgagtgtaaagtaccagtgaccggaagctggttgcgtgaaattagaaatttcgccgctgatccaaacctgtcccatctcatgctcaagcagcagacgaaccgtttgattcaggcgactaacggtaaaaattgcaggggattgagaaggtaacatgtgagcgagatcaaattctaaatcagcaggttattcagtcgatagtaacccgcccttcggggatagcaagcattttttgcaaaaaggggtagatgcaatcggttacgctctgtataatgccgcggcaatatttattaaccactctggtcgagatattgcccatgctacgtatcgctaaagaagctctgacgtttgacgacgttctcctcgttcctgctcactctaccgttctgccgaatactgctgacctcagcacccagctgacgaaaactattcgtctgaatatccctatgctttccgcagcaatggataccgtaacggaagcgcgcctggctattgctctggctcaggaaggcggtatcggctttatccacaaaaacatgtccattgaacgccaggcagaagaagttcgccgtgtgaaaaaacacgaatctggtgtggtgactgatccgcagactgttctgccaaccacgacgctgcgcgaagtgaaagaactgaccgagcgtaacggttttgcgggctatccggtcgttaccgaagaaaacgaactggtgggtattatcaccggtcgtgacgtgcgttttgttaccgacctgaaccagccggttagcgtttacatgacgccgaaagagcgtctggtcaccgtgcgtgaaggtgaagcccgtgaagtggtgctggcaaaaatgcacgaaaaacgcgttgaaaaagcgctggtggttgatgacgaattccacctgatcggcatgatcaccgtgaaagacttccagaaagcggaacgtaaaccgaacgcctgtaaagacgagcaaggccgtctgcgtgttggtgcagcggttggcgcaggtgcgggtaacgaagagcgtgttgacgcgctggttgccgcaggcgttgacgttctgctgatcgactcctcccacggtcactcagaaggtgtactgcaacgtatccgtgaaacccgtgctaaatatccggatctgcaaattatcggcggcaacgtggcaacagctgcaggtgcacgcgctctggcagaagctggttgcagtgcggttaaagtcggcattggccctggctctatctgtacaactcgtatcgtgactggcgtcggtgttccgcagattaccgctgttgctgacgcagtagaagccctggaaggcaccggtattccggttatcgctgatggcggtattcgcttctccggcgacatcgccaaagctatcgccgctggcgcaagcgcggtgatggtaggttccatgctggcgggtactgaagaatctccgggtgaaatcgaactctaccagggccgttcttacaaatcttaccgtggtatgggttccctgggcgcgatgtccaaaggttcctctgaccgttatttccagagcgataacgctgccgacaaactggtgccggaaggtatcgaaggtcgcgtagcctataaaggtcgcctgaaagagatcattcaccagcagatgggcggcctgcgctcctgtatgggtctgaccggctgtggtactatcgacgaactgcgtactaaagcggagtttgtacgtatcagcggtgcgggcattcaggaaagccacgttcacgacgtgaccattactaaagagtccccgaactaccgtctgggctcctgattctcttcgcccgacttcatgtcgggcgatttatattatctgtttcacttgcctcggaataagcgtcaatgacggaaaacattcataagcatcgcatcctcattctggacttcggttctcagtacactcaactggttgcgcgccgcgtgcgtgagctgggtgtttactgcgaactgtgggcgtgggatgtgacagaagcacaaattcgtgacttcaatccaagcggcattattctttccggcggcccggaaagtactactgaagaaaacagtccgcgtgcgccgcagtatgtctttgaagcaggcgtaccggtattcggcgtttgctatggcatgcagaccatggcaatgcagttgggcggtcacgttgaagcctctaacgaacgtgaatttggctacgcgcaggttgaagtcgtaaacgacagcgcactggttcgcggtatcgaagatgcgctgaccgcagacggtaaaccgctgctcgatgtctggatgagccacggcgataaagttaccgctattccgtccgacttcatcaccgtagccagcaccgaaagctgcccgtttgccattatggctaacgaagaaaaacgcttctatggcgtacagttccacccggaagtgactcacacccgccagggtatgcgcatgctggagcgttttgtgcgtgatatctgccagtgtgaagccctgtggacgccagcgaaaattatcgacgatgctgtagctcgcatccgcgagcaggtaggcgacgataaagtcatcctcggcctctctggtggtgtggattcctccgtaaccgcaatgctgctgcaccgcgctatcggtaaaaacctgacttgcgtattcgtcgacaacggcctgctgcgcctcaacgaagcagagcaggttctggatatgtttggcgatcactttggtcttaacattgttcacgtaccggcagaagatcgcttcctgtcagcgctggctggcgaaaacgatccggaagcaaaacgtaaaatcatcggtcgcgttttcgttgaagtattcgatgaagaagcgctgaaactggaagacgtgaagtggctggcgcagggcaccatctaccctgacgttatcgaatctgcggcgtctgcaaccggtaaagcacacgtcatcaaatctcaccacaacgtgggcggcctgccgaaagagatgaagatgggcctggttgaaccgctgaaagagctgttcaaagacgaagtgcgtaagattggtctggagctgggcctgccgtacgacatgctgtaccgtcacccgttcccgggaccaggccttggcgttcgtgttctgggtgaagtgaagaaagagtactgtgacctgctgcgccgtgctgacgccatcttcattgaagaactgcgtaaagcggacctgtacgacaaagtcagccaggcgttcactgtgttcctgccggtacgttccgttggcgtaatgggcgatggtcgtaagtatgactgggttgtctctctgcgtgctgtcgaaaccatcgactttatgaccgcacactgggcgcatctgccgtacgatttcctcggtcgcgtttccaaccgcattatcaatgaagtgaacggtatttcccgcgtggtgtatgacatcagcggcaagccgccagctaccattgagtgggaatgatttgaccctgcactatgaatgaacaaaaccctctgttactacagagggttttttatcttcaagaattataggattgaagttactaacatcgattaattaaaccagctgtccgatttgttctcttctgctttgcccacgcttttcatcagatcgcgaccgccttcagtcatatttctgttggcgtcagcttcagattgcaccacatcggtttgcgcagctttgtgcttcagttcctgatcgataaattcgttttctcgcttaacgcgggcttcttctttcgccagcgccagtttttgtttctgaatctctaagctgcgtagctcatcttcataactttgatcgcgttttttgtccgcagaggcttcggcgtccagtttatcctgacgagctttcttatttgccgctgccgttgccgctcttttgttagcggcggcctgggcatttgcgcgacgttgcttctcttgctggatttccctgttgcgctccgcgacccattcgtcatgctgcctttgctcttcatttttaccttgctgttccgcttctgcgacagcagagagttgatcctgcaatgatgaggcgatagccggatagcttaaggaggctaagatggcgcaaagaaaaactttcttcatgactcctcctgattattagctcttttcaggacatttggtatttggctgaatacgcgtttcgttatacgtcgtggtaataacaacggctaaacctgtcgtaaactggcactctttacccacctgggtagaggtatacactttggtgccttccttataggttaaagaaacaccttccactaaggttttatcattcaccatagaacccgctgccgcgcctacagctccgccgccaactgcacctgccgtcgttccggaattgctgccagacccgacgttgtggccgataacaccgccagcgactgcgccaataagcgcgccgaaggcttgtgcgttccgtttattttgggagttgtctacggcaacttttgcgggaagaatggaaataatattaacggttttagtttcttgtttggtattcagttgatcggtttgataaacatcggcagcatgatcgtcagcatttgactggcatcctgccagagtgaatgacgctaacattgccacaggcagaagacattttttaaatttcatcactattccttgttatacacattacgaaaaataagacatttaagatcatcaaaagaggaaagtaaatgtattgcgtataaagggatagattaaatttattaaaattcacgcagggaataatttataaaaatatatcattacaacatatatattaattttatatttatttcgcagccaaacaggataaacatcagtcaggataaagacgtaaaatttaagatgaaagaatatctgccgctttgataatcccaaacagcaaaagcatccgacagcgaagtgccgttatgttctgtgaaagtggagaaggtaaccgctaacgttgtaccggtgattcgacggagagtgtggattgctgagcttcttttttgctctgatggtgctgccaggcaccgacggacgagtagataaaacggccaaagaagaagataaagctgatgagcagtacgatacgggtcatgcgactgttaaatcggtgtcgttttcgcatactggttgcctgactcacaaaaggttccttgaagtatgtcccacgctgtggacggtacttacattaaggcacaacaggacaaaatggtcaattcttcgttatgtaaaaaagcgtcagtggatacatattttaatgttatggaagttaatttaattatttacaatgatgatgtaataatgatgaattaacatgataaacgtaataattcattaatcagggttattttgtttgatatatatcaattggtactttcatatgacacttagaatcaatgctctctatagtgatgaataatcatcattcgaagtcaggtgggatgcctgtctgaatacacctccttcaggatgtgggggattctgctgagcatctatgaaactgaatgcaacttatataaaaatacgtgataaatggtgggggcttccgctgttcctgccttctttaatcttgcccattttcgcccacattaatactttcgcgcatatttcttccggtgaggtttttctcttttatctgcctctggcactgatgatcagcatgatgatgtttttcagctgggcggcattgccagggatcgccttagggatttttgtccgcaaatatgcagagctgggtttttacgaaacgctatcattaacggctaattttattatcattatcattctctgttggggcggttacagggtctttactccccggcgtaacaacgtttcacatggtgatacccgtttaatttcccagcgtatattctggcagattgtgtttcctgcaacgctgtttctgatacttttccagtttgctgcatttgtaggattactggcgagcagagaaaatctggtcggtgtcatgccttttaacctcgggactttaatcaattatcaggccttactggtgggtaatctgatcggtgtcccgctgtgctacttcatcattcgggtagtgcgaaatccattttatttacgtagctattattcgcaattaaaacagcaggttgatgccaaagtcaccaaaaaagagttcgcgctctggctactggcattaggtgctttattgttgctgttatgcatgccgttaaatgaaaaaagcacaatttttagcaccaattataccttgtcattattgctgcccctgatgatgtggggagcgatgcgctatggttataagctgatttcgctgctctgggcggtcgtgttgatgatcagcatccacagctatcaaaattacattcccatttatcctggctataccacgcagctgaccataacctcctccagttatctggtattctcttttattgtcaattatatggctgtactggcaacccgtcagagagcggtagtcagacgcattcagcggcttgcgtatgtggacccggtggttcatctgccaaatgttcgcgccctgaatcgcgcgttgcgtgatgccccctggtctgcgctttgttatttacgcatccctggcatggaaatgctggttaagaactatggcatcatgctgcggattcaatacaagcaaaaactttctcactggctgtcacccttgctggaaccgggtgaagatgtttatcagctttcgggtaacgatctcgcgctgcgactgaatacagaatcgcaccaggagcgcattaccgcactggatagccatctcaagcaatttcgtttcttttgggatggcatgccgatgcaaccgcagattggcgtcagttactgctatgtgcgctcgccagtgaatcatatctacctgctgctgggagagctaaatacggtcgccgaactttccatcgtgaccaacgccccggaaaatatgcagcgtcgcggggcaatgtatttgcaacgcgaattgaaagataaagtcgcgatgatgaatcgactacagcaggcgctggaacacaaccattttttcctgatggcccagccgattaccggtatgcgtggtgatgtttaccatgaaattcttctgcgcatgaaaggtgagaatgatgaactgatcagccccgatagcttcttgccggtcgcgcacgaatttggtttatcgtcgagtatcgacatgtgggtcattgagcatacgctgcaatttatggctgaaaacagagcgaagatgcccgctcaccgttttgctattaatctgtctccaacctcggtatgtcaggctcgttttcctgttgaagtcagtcagttgctggctaaatatcagattgaagcgtggcaacttatttttgaagtcaccgaaagtaatgctctgaccaatgttaagcaggcgcaaatcaccttgcagcatcttcaggaattaggctgccagattgcgattgatgatttcggcaccggctacgccagctatgcgcggcttaaaaatgtgaatgccgatctgcttaaaattgacggcagttttatccgcaatattgtgtcaaatagtctggattatcagatagtggcatcgatttgccacctggcgcgaatgaagaaaatgctggtagtggcagagtacgttgaaaacgaagagatccgcgaggcggtgctctctttggggatcgattatatgcagggttatcttattggtaagccgcagccgttaattgatacgctgaatgaaatcgaacccattcgcgaaagtgcctgaataatgcgggccgacatttctcgtcggcccgcaaagtattaagcggcgatttctggtgtactttcttcttcaattttcaaccgccagccagccacgccttcccagtattcttgctccttttccagatcaagcagtaccagcgcattctgactaaaccagtcatgcgggaaacgcagtgtccagtgactgtcatcagtaatcagcgtcaatgttggcggtgtggtggttgcctgacgttgattgttgagtaatacgccaaggcgcaatagctgtatcagtggcaggaactgtttcttcttaaacaaggtaaagcgcggcagatcgtcgagcttaatcgctttacggtgatagcgcaccagtgtcgccatcatcagctgctgttcctgattaaaacccggcaagtcactgttttgcagaatataagcggagtggcgatgcaaaccgctgtggttgatattcaacccgacctcatgcagcatggcggcccatcgcagtagcgcctccagttgcggatgcgccagcttcggttgctgttcccgccactgttcgtacatttgcatagtggtatccagcacccgtcgggcctgttcgctgtcgatgtgatactggttggcgaggctgctggcggtgcgactacgcacatcctgatgacggaaacgtccttccatttcatacagtacgccttcgcgtaacgccccgtcagaaaggcgcagttcacggatggctaaagcatcaaacacaccgcataaaatcgccagtcccggaacgaagactgttttccgctcttcggaaagacccggtaaactcagcgatgcgaaattacggtgacgtaaaacttcttttaccagtttttccagacgttccggggtaattatcccgtctttctcgcccatttccattaacacttcatgggcggcttttatggtaccggaagcgcccattgcaacgttccagccctgaatacggaattgccaggttaaagtttccagtttttgtgctgccgccatgcgagcgcgctgaaaattctctttattgatgaccccgccaggaaaataaagctgggcaaagctgacacaacccatccggcggctttcaacgagaataggttcgaaattttcaccaatcaccagttccgtagatccgccgccaatatcaataaccagtttgcgacctttttccggttgggtatgttccacgcccataaaaatcagacgggcttcttcattaccggaaataatttcaatcgggtagggaatgaccttttccgcgcgtttcagaaagtcagtggcgttcagcgcctgacgcagcgtatgggtaccaactatacagacgctggcaggagaaaacccttgtagccgttcggcaaacagcgacagacagtttaaaccgcgcgtcattgcctcttcactcaacatattatctggccccaggccgtccgccagatgcacccgctgtttcaggcggccaataatctgcatggcaccatctaccacacgggctatgaccatgtgaaaactgtttgaaccaagatcgaccgcagcaaactcctgcggacgaggggatttatcgtgtattggcatagggttattcaggttgttcgagtgatttgatgtagtcataaatcgccaactgcgcccgtactttgcggcgattgccgcggggaacgtagcgattactgagttctttatcgatataacgtgctttgaccgtatcgctgaacaatatgtcgatgatgtccagtacccgctgcttcaggcgcggatcgagcagcggcgtcgccacttcaatacgataatcaatattgcgcgtcatccagtcggcggaagaaaggtagacctttttatcgccgccattttcaaaaatataaacccggtcatgttcaaggtaacggtcaacaatactgatggcacgaatgttgtcgctaatgccttccagattggggatcagcgaacacattccgcgaaccagcagattaaccggtacgccggagctggaggccgcatacagacgatcaaccaggcctttatcgacaaggttatttagcttcagggtgataccactgggcagcccttgctgcgcgttggcgatctcgcggtccaccatttcatacaataggcggcgggagttttgcggcgataccattaaataatcaaatgtcaccggacggtatgggttttcaataaagttaaatacccgccgtacttcgttggtgatgcgcgcatcggcggtcagcaacgaatagtcagtataaagacgcgcggttttttcgttaaagttcccggtcccgatgtgtgcataacgcaccacttcaccgttttctttacgtgaaatcaggaacagtttggcgtgaattttcagccccggcgcagagaagataacgtgcacgcctgcttcggtcaggcgcttcgcccagtgaatgttggcttcttcgtcgaaacgcgcctgtaactcaaccaccacggtgactttcttaccgttatgtgcggcgtggatcatcgagtcgatgatgcgtgaatctttcgccacgcggtaaatgttaattttaatcgccagtacgctcgggtcgaacgaagcctgacgcagcagttccagcacatgctcaaaggtgtgataaggataatagagcaacacatcgcgttcgcgaatggcatcaaaaccattgcggaactgggctttatcaaaccaaatatggcgtaaacgcggcagtggtttgttcaccagattggctttgccgacattggggaaattaataaagtctttaaaattatgataacgaccgccggggacgatggagtcgtagcgggaaatagtcagtttttcgcgtaacacttcaaccagcgcattgggcatatcgcgctgataaacaaaacgcaccggctcagcagttaaacgctgcttgagactggaagacatcaactccatcaggctggcttccatctcatgcactaaatcgtattcggcatcgcgggtcatcttcattgaataggcattcagcgcgtcataatcaaagaagcctttgaaaatatcatcaaggcagtaacgcagaatgttatccagaagaatcatcggcttgcgtcgacgcggcgcttctggcggtaaattcacaaagcgcggcactttatctgatgggatctccagcagcgcgtaacggatggtatcgccacggataatttccaccgccagataggtgtaatcatctttcaggaactgcactaagtcagtgtcaggattgattaaaatcggcgtaatgtgctgacgcagatactgcttaaaataatgacgcagccagttttgttgattgacggagagctggcgttcattaatcaggaagatctggttgcgcgccatctccagcaatagctcgttgtagaggccgtcgaattcctgatcggctttcagcacccgggactgaattttgcccagtaaatggcgggaatgagagttggagccttgttcttcgctaataatgatgcgtcgcttcagttcagcgaagcggactttatagaactcatcaaggttattggaatagatccccaggaaacgcatcctttcaatcagcgggttagatttgtccgccgcttcctgaagcacgcgttcattgaacgataaccaactgagctctttttcgatgtatagcttttcctgacccattaccacttttactccgttttattcacgggacactgcctggatattatggcgagcaatattggcagatgtccaactatgccagaaaagggggaaaaaaactgctggagcttgcgatttacaggtgaattgaaaaacgccagcggcagagctggcgctttaattacgggggtattactcgtcggcagcgtagccctgcggcggcagacgttgaccatccagccacgcggcgttttcgtgcattttcagacgaccatcggcaaaccagctaatcaccagtggataaatggcgtgttcctgggtttgcacgcgggcggtgatgtcatcttccgaatcaccagcaaataccgggactttcgcctgtaaaataaccgggccaccgtccagttcatcggtgacgaaatgcaccgatgtaccgtgctcttcatcgccattttccagcgcctgacgatgggtgtgtaatccgggatatttcggcagcagagaagggtgaatgttcagcaaacgcccggcatagtgggagacaaacgccgggctgagaatgcgcataaaaccagccagcacgaccacatcgggtgcgtacatgtcgatttcatgaatcaactcccggtcataggcttcacgactgtcaaacgcgctggcgatgagcgtatgcgttgcaatacccgcctggcgggcgcgttcaaggccgaacgcgtcggccttattgctgaaaactgcccgtacggtgcctttaattttgttggttttacaggcgtcaataattgcctgtaaattacttccgttgccggaaataagcaccacaatattcattattcgataaccacgcgttgttcggaatcagaggctttgatgataccgattttccacgcgttttcaccgttggcattgagcagggcgagggctttgtccacttccggagcaggcagggcaataatcatcccgacgccgcagttgaaggtgcgatacatttcatggtgctcaacgttacctgccgtttgcagccagttgaacacttccggccactgccaggaagattcatcaatcactgcctgagtattatctggcaatacgcgcggaatgttttcccagaagccgccgccggtcaggtgcgcaatggcatgcacatcgaccttttcaatcaactccagcactgacttcacgtaaatgcgggtcggtgccagcagatgatcggctaatggcttaccatcaagttcggtggtttgcggatcacaaccgctgacttcaagaattttgcgcaccagcgaatagccgttcgagtgtggaccgctggaaccgagtgcaatcagcacatcgccgtcgctgactttagagccgtcgatgatttctgatttttctaccacgccaacgcagaaacccgcgacatcgtaatcctcaccgtgatacatccccggcatttctgccgtttcgccacccaccagtgaacagcctgattgcagacaaccttccgcaatgccgctgatcaccgctgaagcggtatcaacatccagttttccggttgcgtaatagtcgaggaaaaacagcggctctgcaccttgcaccaccaggtcattaacgcacatggcgaccagatcaataccaatggtgtcgtgacgttttaagtccattgccagacgcagcttggtacctacgccgtcagtgccagaaaccagcacgggttcacgatatttttgcggcaatgcacacagcgcaccgaagccgcccagaccgcccatcacttccggacgacgcgttttcttcactacgcctttgattcttccaaccagagcattacccgcgtcaatatcaacaccggcatctttgtagctaagagaggttttatcggtcactgcttgggtccccacgcgttacttgcggtagaaaaataaaattcggcgcaattctaacagggaaagcaaacgtttgcgagactgctttacacaacctttttgcacgtcttttccccaggcgcgcggcgaaagaagacttgtgccagggtaaaggttagttttcggatggaataatcttctttcataaccatctgaatataaaataactttatctcaaaccgttatcattttgactaaagtcaacgaaaagaatattgccgccttgaagaaaggaggtataatccgtcgattttttttgtggctgcccctcaaaggagaaagagtatgaagatcgtggaagtcaaacacccactcgtcaaacacaagctgggactgatgcgtgagcaagatatcagcaccaagcgctttcgcgaactcgcttccgaagtgggtagcctgctgacttacgaagcgaccgccgacctcgaaacggaaaaagtaactatcgaaggctggaacggcccggtagaaatcgaccagatcaaaggtaagaaaattaccgttgtgccaattctgcgtgcgggtcttggtatgatggacggtgtgctggaaaacgttccgagcgcgcgcatcagcgttgtcggtatgtaccgtaatgaagaaacgctggagccggtaccgtacttccagaaactggtttctaacatcgatgagcgtatggcgctgatcgttgacccaatgctggcaaccggtggttccgttatcgcgaccatcgacctgctgaaaaaagcgggctgcagcagcatcaaagttctggtgctggtagctgcgccagaaggtatcgctgcgctggaaaaagcgcacccggacgtcgaactgtataccgcatcgattgatcagggactgaacgagcacggatacattattccgggcctcggcgatgccggtgacaaaatctttggtacgaaataaagaataaaaataattaaagccgactttaagagtcggcttttttttgagtaaagcgcctataacacataatacagaggataatactatgacgcgccgtgctatcggggtgagtgaaagaccgccacttttacagacaatcccgcttagtttgcaacatttgttcgccatgtttggtgcaaccgtcctggtgcccgtcttatttcatattaacccggcgactgtactgttatttaacggtattggaacgctgctgtatctcttcatctgtaaagggaaaattccggcttatcttggttccagctttgcctttatttcaccggtattgttactgttgccgttagggtatgaagtcgcgctgggcggctttattatgtgcggcgtgctgttctgcctggtttcttttatcgtgaagaaagcggggaccggctggctggacgtgctgtttccacctgcggcaatgggcgcaatcgttgccgtcatcggtctggagctggcgggcgtagctgccggtatggcgggtttactcccggctgaagggcaaacgccagactccaaaaccatcatcatctctattaccaccctggcggtcacggttttaggttccgtgctgtttcgtggtttcctggcaattatcccgattttaattggcgtgctggtggggtacgcgctctctttcgcaatgggaattgtcgataccacgccgattattaatgctcactggtttgcgctgccaaccctctatacgccgcgcttcgagtggtttgccattctgactattctgccagcggcgttagtggttattgccgaacacgtagggcacctggtagtaacggctaatatcgtcaaaaaagatctgctgcgcgatccaggtctgcaccgttcgatgtttgctaatggcttgtcgaccgtgatttccggcttctttggctctacgccaaatactacttacggagaaaacattggcgtgatggcgatcacccgtgtttacagtacctgggttatcggcggggcggcgattttcgctatcctgctttcctgcgtcggtaaactggctgccgctatccagatgatcccattgccggtgatgggcggcgtttcgctgctgctttatggtgtcatcggtgcttccggtattcgtgttttgatcgaatcgaaagtggattacaacaaagcacagaacctgatcctgacttccgtgattttgatcatcggcgtcagtggcgcgaaggtaaacatcggcgcggcggagttaaaaggtatggcgctggcaaccatcgtcggtatcggcttaagtttgatcttcaaactgatcagtgtgctgcgccctgaagaagtggtgctggacgcagaagacgcggatataacagacaaataatgtaccgaccgggcagtgttgctgcccggttcaaacatcatgggattctgtggtaaacttctcgcgattttgtgaaatcctggttgaggtatctctgaacacaccggcacagctctctttgccactttatcttcctgacgacgaaacctttgcaagtttctggccgggggataactcctctttactggccgcgctgcaaaacgtgctgcgtcaggaacatagcggttacatctatctctgggcacgcgaaggcgcggggcgcagccatctgctgcacgcggcttgcgcggaattgtcgcagcgtggcgatgcggtgggctatgtcccgctggataaacgcacctggtttgttccggaagtgctcgacggtatggagcatttgtcgctggtctgtatcgacaacattgagtgtattgcaggcgatgagttgtgggagatggcgattttcgatctctacaatcgaattctggaatcgggcaaaacacggttgttgatcaccggcgatcgtccaccgcggcagttgaatctgggattaccggatctcgcgtcgcgactcgactgggggcagatctacaaattgcagccactttctgatgaagataagttgcaggcgctacagttacgcgcgcgtttgcgtggttttgaactgccggaagatgtggggcgtttcttgctgaagcggctcgacagagaaatgcgcacgctatttatgacgttggatcagttggatcgtgcgtcgattaccgcgcaacgtaagctgaccattccgtttgtgaaagaaattctgaagttgtagataaggtgtttattgtcggatgcggcgcgaacgccttatccgaactacgcgaagttaatccatagtattcgtaggccggataagacgtggcaagcgtcgcatccggcaatgtgcttcaactagcgatggagcacatcttaacccacgatttccagtacctgctccggtggacgaccaatccgcgctttgccattcgcgaccacaatcgggcgctccatcagcttcggattatccaccattgcctgaatcagcgcctcttcgctaagcgaactgtcagccaggttcagttctttataaagatcctctttctggcgcatcaattcacgggcgctattcatccccagtattttcagcaaatcgcgcagcgttgccgcatcggcgggtgtctcaaggtagagcaccacttctggctccacgccgttttctttcagcaggttcagcgtttcccggctctttgaacagcgtgggttatggtagatttttacctgtttggtcattgttcttcctttaatgcgaattacatcttggtataaggcttaaagcgttcctgcagctggcgcaactggtcgatgcgcgcatcgtaacgcgcttgttgcaggctgcctaatttcacctgcgaactggcgctactcaacagcgaaatggcctgatcgagtcgtccggcgagcgcataaccttctgctcgcgcagccagctcctgatcgcggttatttagcgcggcttccgcctgtgccagcaaatcccagccgttgctgtcatctttattattaaaggtgtagcgattcagaatattggccgcttcttgtggttgaccgccttgcaaataagcgttcgccaggttgagctgcaacaccggattggtgcgtaaatcgcgggcatttttcagacgattgatcgcctcattggctttgttttgcccaagatcgatatcagtagccagatcgagataccatgcgttgccaggttctgccgccagtaacggttgcagcgttttacgcgcctcgtcgtatttattggcttccatcgcctgtaaagcacgaccatattgtgctgctcgttgctgacgaacgtttcctttcgcccattcatccagcaaatcactggtgagctggttacgtccggaattatacatccccagtgtgcgcgctttcgccagatagaaatcttccgacgactgcaccaccatcgggcgcatctgattagcacggttgcgggcatctgccagacgactttccggcaacgggtgagtcaataaaatttccggcgggcgcgaggagtaacgcgcctgatcgagtaatttttcgaggaaggttggcatcgcctgcggatcgaatcccgagcgttgcagcacctgaataccaatgcggtccgcttcctgttcattttgctgggtgaaactgatcatcccctgacgcgttcccgccagtgtaccggtcagcgccgccatccccgcctgcggactggccatcgccagtaaaatagaacctaacgcgccgacccaggtcagcggcgcgctgcgctgctgatcttccatcgctcgcgccaggtgacgttgggtgacgtgggagatttcgtgcgccataactgaagccagttgactttcgttatcggaataacggaacagggcagagtgcagcaccacgttgccgccaaagaaagcaaaggcgttaatttcgtcgttgttgatcagaaaaaaatgaaacggtgtcttaaccgaattggcatgcgaaaccagacgcatccccagcgaattaatatattgcgttaacagcgggtcattaattaacggcgcgctgccgcgtagctggcggacataatagtcgcccatctgcatttcctgaccaatggaaagcgtgcttcctgcggaggttcccatatccggcaaggtgtctgcgctgtcggcaaacgccggggctacctgaccaatggtcatagcagcaatgagggttgcaaccaggttttttttcaactgcctgaacataacctctatcctgtatttctggagatagtcatttgaccgatactgtgaaatatcgttcccaccgcgccgcctttgagtgtaacggcgaagattagcccactcaaatgacttttcagtttcctgaatccgtcataaaaagcgaagtcttttttgtgacatttcgatacaattgcggatcgcaatcccgctcttgaggttcagggaaggtctttatgctcgaaatgttgatgcaatggtatcgccgccgttttagcgacccggaagcgattgccttgctggttattttagttgccggatttggcattatctttttctttagtggcctgcttgctccgttgctggtggctattgtgctggcctatttgctggaatggccaaccgtgcgtctgcaatctattggctgctcccgccgctgggcgacgtcgattgtattggtggttttcgtcggtatattgctactgatggcgttcgtggtactgcctatcgcctggcaacagggcatctacttaatccgcgatatgccggggatgctcaataagctttctgactttgccgccacgttgccgcgccgctatccggcgttaatggacgcgggcattattgatgcaatggccgaaaatatgcgcagtcggatgctgaccatgggcgattcggtggtgaaaatttccctcgcctcgctggtcggtttgctgaccatagccgtctatctggtgctggtgccattgatggtcttcttcctgctgaaagacaaagagcagatgctgaacgccgttcgccgggtgctgccgcgtaaccgtgggctggcaggacaggtgtggaaggagatgaatcaacaaatcaccaactatatccgcggcaaagtgctggagatgatcgtggtggggatcgccacctggctggggttcttgctcttcgggctgaactattcgctgctgctggcagtgctggtcggcttctcggttcttattccgtacattggcgcatttgtggtgaccattccggtggttggcgtggcgctattccagtttggcgcaggtactgaattctggagctgcttcgcggtgtatctgattattcaggcgctggacggcaacctgttagtgccggtgttgttctccgaagcggttaacctgcatccgctggtgattattttatcggtggtgatcttcggtggtttgtggggattctggggcgtattcttcgccattccgttggcgacgctgatcaaagccgtgattcatgcctggcccgatgggcaaatcgcgcaagaataatcttcagcccgacgaactgtttcgccgggctgatttttcagggttcctgacgtaaataaatagcccgataacacatactcaccagcaccgcaccgccgataatattacccagcatcaccgggagcagattggcggtaataaaatggctgaccgtcagtgccggaaaattgtctgcgctactgtgcgccagctgccagaaggggggaggggcgaaatggcgaatggcaatggcgaacggaatcacaaacaaattggcgatacagtgctcaaagccactggcgacaaacagggtgatgggcaaaatcatggcgacgattttgtcgcataacgaacgcccgcaataactcatccacagcgccaggcaaaccatcagattgcacataatgccgaggctgacagattcagtaaatgtatgatgcattttgccctcggcgcagtgtaaaaccgcgactccccacatcgcgttttcactcatcaccagcccggaaaaccagattaacaaactgaaacaggcaatacctgccagattaccgcaggccaccagaagtgcgttaatcagccaagttcgccaactaataacgccccgactttttgccatcaccgtcattaccgacgaggtgaacaggctggtgccgcaaaccgccagcaaaataaagccgagtgtaaagcaaaggccgcccaccagatgggttaatgcctgtgaagacggggcatcggcgataacggaaaggtaaaaagtaaatccgatcgccataaacacgccagcggacatcgccattaaaaagaccgacactttactgcgggcaattttatgggcggcaatccgttcagcgattgccgcttttctggcgctcaactgcaagtcgaaagagagtttgtttctcatgcatactcctgcaaaagcagattacaacacctcgcgaaccgagatccccagccgctgcattcgtgacagcagcgtggtgcgcttcatccctaatcgcgtcgctgcgccacggggcccggcaacaatgccattggtttctcgcaatacctgaacaatgcgctgacgttcttcttcgtcattctctggcgtcgtcgggtgcagtaactgcgccattgaactgcgaagcgctgaatcttcatttagcgtcggcagtaaacggctttgtcggacatttagatgtaaattcagactgttaccacgagtcaacagtaccgcccgctcaatcacgttttccagctcgcgcacgttgcccggccaatcccacgacatcaactggcgtagtgcctcggtcgggatggcgtcaattgcgcgattcatatggcgcgccattttttgcgtgaaatgttttgctaaaagagggatatcttccggacggtcgcgtagcggcggcaattccagtgggaagacattcaggcgataaaagagatcgctgcgaaactggcgatcttcaaccatttgccacaaatcacggttggtggcggcaatgactctgacattcaccgggatcgttctactcccgccgagacgctcaatctcccgctcctgcaatacgcgcagcagtttaggctgaagttctaacggcagatcgccaatttcatcgagaaacaacgtgccgccatcggcaatttcaaaacgaccacgatgggtattaatcgcaccagtaaacgcccctttgtcatgaccgaataactcactttccagaagactggcggggatggcagcgcagttgattttgaccagcggcttgtcgcgtcgcgggctaagttgatggatcgctctggcgatcacctctttgccagttccggtttcaccacaaatcaacaccgtactgtcgctcttcgccacaatatctacctgctggagcaggtcttccattgcctggctttgatagataatgtcaccgatgcccagattcgaaaggagctgctcgctaagctggtggttttcttgctgcaaactttcctgcaaatcggtcatgctacgccaggcatcggcattgccaacggcaatagcgatgcgatcggctatgtgttgtagtagctggcagttttcctcactaaagagagtggaagaggtatgcgccagcaacaatgcacccggtgtatggttgccaaaggtaagcggtataaggagcgcagattcgcagccgttagatgcaagtaagagtaataacgggtcgcgttgccagagaaacagatcatctgcacggtgcgtcaaggtcggttgtcgggtttgtagcgtttgtgtcagcaatacactttcgccaggcatacagcgtggcagacacgcacaatgtgaggcagaaagatcgctgcaccacaggctgaacttctcgttctttcgatgatcgcccagtaccatactgactgaagccagaccgaaaaaatgatggatctcacgagcgacgtcagcgatcagatcgtcgagatcaagatgtgacagcactgcattagtaatatcaaccagtacccgatgatgatcgcgatctttctccagcaaacgcagcgccacctgctgttcttcatcattgagccatgattgcagaaccggggtgattatccgcgccagccagttaaacagtgtgcaatcctgggaagtaaaacgactgccgtgggtgcgaataaagcgtagctccgccattccactactgccgagaaggacggcgtgacgcgaataatcgaccatctcgccctgatactctgttgttgccgtcacatcgctgccatcatcatggtagcggtaatagaagttgcttttgagaacatgcagttcaataagttgtaccgggctgaacggcggcggcagcgggatgaaggcgcgtaataaagacgccttgccgtgtttctgtgctaaccgctccgcgagcattccgtttaccgcttcaattgttattccttgtggcggggcaaacatcgcctcgtctgacatagccatcaacagtccttattaatgagaaatccttctcacgcaatttttctggccatcagatagatggccggttcctgcacaatttcatccaacagatgaatgaattgaatgctacgcgcctgccacacagacgtcgcgtcatccgccagtggcgcgaatgcccgggtcaacagggcggtgtggctggcgtcaataacaatctcaccaaaagtcatcacccccagcatcttacgtcgggcttgctcctcttcgaccagtgcaagccaatcttcgtattccgtcagtgggcagcggaaggcgacattcagacaatcaatcacgccaacgtgatggccgatagctagcgagtaatacattacctgagagctgtgttccggcatctcgtcgctactggcgacaaacttttttcgcagcgtccagaaaacaatttccccgcactcttcagtcatgtaacccccggagtatgcgaaagagttgctgaacgatactattgagacgtggatcgtcggcatcgcgcaaccaggtgttaacccgatttcctgtaggatcgtcgcttaaatggcgcaggagccgatcgcaaatttctcgcccctgacgatagcccgccagccgccgcgcttctcgctcaatggcgatacgctgtgatggcgggatctgcggccacaacggttgcatagtcaccccggtgggatcgcgataatccacagcgtgaatcttctgttgcagcaaaccgagcgccacggcgaaaccgtgaatggtggcggccggtgttggcgggcagccggggatccaaacatcaatggggacaatggtgtcgctaccgccccagacgctgtagagatcgtggaaaataccgccgccgacaccgcacgcgccgtaggaaacacaaattttatgatcgggggcagactcatacgcccgaagtgcaggcatacgcatcgcccgggtgactgcgccagtaaataacaaaatatcggcgtgacgcggtgatgaaacaaccttaatgccaaaacgttctgcgtcgaatactggtgtaatggcagcaaaaatttcgatttcacaggcgttgcagccgccgcaatcgacgcgataaacgtaagccgagcgacggatatcctgtagcaaatgccgcttcatcttttgcgtttgctcgtccagcgtgatgggctggctgacatgttgtgtaagcactggactcatagctgctccttagccaccagcagtacatctgtatcgtcgttgatcagcgtcgcgcgttgtttgcattccgggcagacgctcgcttgcgcccacaacatttcgcggttttgtggcgcattttgttgctgtgctaacaattcagcagccagtgcgatggttttttgcggggcaaacgggcgttcgcaacggctgcaacgttgtagatggaacgtcgcgcgggtatagagatcggctttattggtgacggtcagttcaaagttattggtaagctggatggctctggtcgggcacacttcttcacaacgtccgcagtaaatacaacgccccagatagagctgccaggtgcgcgaattttgctggtcgtcggtctggatagtcagcgcatttgccggacaagcacaggcgcaggcaccgcaggcaatacattggctgggcatcaggtccggttttccgcgaaagccagggctgacctccagtggcgcgaagggatatttcaccgtcgcggttccggcgcgcataatagttttcagtaacttcagcatcttctgtccttacttcagcggcgaacggttacgatcaatgccgtagcgttcgatctctttatacggcacggtttttgactggcgcttgcgcacatctaccagcgtcacacggtcggtacaggagtagcagggatcaaggctaccgataatcagcggtgcgtcagaaacggtattgccgcgcagcatgtaacgcaacaccggccagttggcgtaggtggcggcacggcagcgccagcggaacaatttttggttatcaccgagcatgctccagtgcacgtcttcaccgcgtggcgcttcaacaaagcccagcgcgaatgcgtgaggtttatagctaaagccttcggtcagcagtggggtatccggcatgttgtcgagggcaaattccagcattgccagcgaatcaaacgtctctttgacacggaccatcacgcgggagaaaacatcgccgccggtaaaggtaaacagtgtttttggaatattgccgtagtcggcgtaggggtgatcaaagcgcaaatcacgggcgatttgtcggtcgagaatgccaatgccctgagtgcgttgttccatattcggcatagcaagcagcatctctaccagctccgacacgtcggcgcgcatctcgcgcaccagtttcagcgtttgcagacgttgctctttgagaatatcgcggcgaacaccaccaatcagattcagaccgtaggttttacgcgacccgatcagcaattccgccatcgtcatcgacttttcccgcacgcggaaaaattgcataaagccggtatcaaaaccaacgaaatggcaggagaggccaaggttaagcaaatgactgtgtagccgttcgacttccagcagaatcgagcgaatagtatgtgctcgttgcggcacctcaatccccagtgcattttcaaccgaattggtataggccacactgtgggcaaaaccgcaaatcccacacacgcggtccgataagaaggtcacttcgttgtagcccatccgcgtttctgccagtttctccatgccgcgatggacataaaacaggcggtaatcagcatcgacaatttgctcgccatccacaaacaagcggaagtgacccggttcatcggaggtgatatgcagcgggccgacagggatcacccgcgcatcgctgttgccctcattgataaacggatacgtttcggaatcagtcgtcggttcagggcgcagtcgataatccatcgcatctttgcgcagcggatgcatatcttccggccagtcatcgggcaacaccaggcgacgctgatccggcaggccaaccggaatcagcccgtacatatcgcgaatttctcgctcgccccagaccgcggcagggacgcgcggtgtgactgacggaaactcccgactgtcggcatcgaccagcgccttcaccacaatccagcatttttcggccccttccattgaaagggcataataaaccgcgtaatgaccgttaagtgtccgctcgtcgttgccaaacaggaccggaagccagccatcatgttgataataaagatactgtacaacgtcaggcagcagattgattttcaccgtaatggtgacctgttcaggcgtttgtcgctcttcatccagcaccgcgccggggaactgcgttttcagggcggcgagaatcgcttcgccacgatttgacgatgaattaacgttcactgtgtttctccgaaacagatgcggtgcctgaaggcaaaaaatcatgccaggtgctacgttgtgcaggcagatcgtgcgtccctgagaggactatagtggaagcgcccgccaggatcctgatgacaggttgtggaatatgcgttcccatcgccagcatcatgaccagcagaatcaccattggcgaggtggtcaaccagccgagatcaccccggttaacggcctgcggcggtttcgccattaacacccgcgcagccatccgtaccaggcccgccagcaccagcgttaacagcaataacagcaggacgataatcagcaggtgattacgtgccagtccggcggtaatggtcataaattcgctaagaaaaatgttgaagggcggcatccctgccagcgccagcgcaccgccgccaaacagcacggcggtaaatggcatgattttgagcatcccacagacgacgttgagatcgcgcgtgccgtacttgagcagtacattgccggaaccgcagaacagcagcgtttttgccagactgtggtttaagatgtgcagcagcgcggcaaaaattcccagcggcccgccaatgcctagctccaccgcgaccagccccatgttctccacgctggagtacgccagcagacgcttaatgtcccgctgtaccagaatgaaaaatgccgccacggcaaccgacaacatgccgaagatgagcaacaaccggttggggaaatcgctgccgatggcttggcaaataatgatgtaatagcgaatcagcaccaacagcgcgcagttcagcaatacggcggagagcagggcgctgaccggactcggcgcttcactgtgagcatccggcagccaggcgtgcatgggaaatagcccggttttggtaccaaagccaattagcaaaaacacaaaggccaacagcattaatgttgggtcaagcaaggacgattgcttaagaacctcgctccagaatatcgccatttctgcctgcggcataacgctggcggcgttggcgtataccagcacggtaccgaacagaccaaaagcgacaccaacagtacaaataatgatgtacttccatgcagcttccagcgatgaacgctgaccgtaaatgcctaccagaaacgccgagcttaaggtggtggcttcgatcgccgcccacatcacaatcaggttattgctggtaacaaccagcagcatggtgaacaaaaacagatggaagaaaccgtagtaatcgcacagcgtaacgggtgaaagctcgccgtgtgccacttcatgacgcatgtagccaatcgagtaaataccggtgagaaagccaatcacaccaagaatggcgaggaacaaaccgcccagaccatcaatatgaagccacagtcccgcagcgaatatttctcctgcatcagcggcagtttggaccacccagagtgccagaatcagcagcagtgtgatccctaagctatgtaatacggtcaccgtgcgagtcgcagaaagtctccgtttccggcaggcaaaacagagcagcgaaaaaagcagcggcgtgagcaggagtaaagcgaacatcacagaataactcatctcattatcccttcagcgcggtcaagttgttcacgtccagcgtgccgtgggtacgccatatttttcttgccagtaacaccatcacaatgacggcgaagatggcgtcggtagcgatacctatttccaccagttccggtgctcgccaggcaagaagcgccagcaccagatgggagccgttttccatcaggcagtaaccaaaaatttgccgcaggatattgcgctggctgacaatgcacagcaggccaagcagaaaatgacctaacgctaccgccagcgccggtttcagcccggtagccatcggtagcttcacgggctgaacgacaaatgcgcaaagcaggacaattaacgccgcgagcagtgccatcattgccggaccgaataacgctttttccgggatgttctggggaatatttcgtgcagcgtaagtcatgattaacggtaccagcagcactttggtgataaaggcgctggcggaccagatcagcagttgctctgcggcgaacaggcacgagagagtggcgaaaatagacaccagcaccagtgactggcaggcgtaaaatccgcatgacaggcgatagcttttgacgctaatcacaaacagcgatgtcagcatcatcagtcccgccagattatttacgatcatagaaccggtcattcatcatctccttactgcaaccaggtcgcggcgattacgctggaaatcagcgacatcacaatcagtacaatcaacaccaggcgcattgatcctggcagcggtgcggcatcggcgacggcctcgctcggtttgccaggcacaacgcgaccaaaccagcgaataaaccaggcgaaactggcgaccgattcaatcatcagaagaatcatggcgggcagcaggatccagtactccactgacaacgcaaaaccggcagcaaacagcgggaatttactgaagaagccgttgaacggcggcacgccggtaatcgccagcgctgccacgcagaaacccacgcctggcaacggcagggtgtgcaatacgccacgcagacgcggcaacaagcgcgtgccgcagctgtaactcagcgcacctgctacaaggaaaaacaggcttttagcgaacgcgtggttgacgatgtaggcgatgctgccctccagcgccagccgcgagccgaagatggagagcgacaagccgaagaacatccagccaagttgagtgatggtcgaccaggctagcaaccgcttcatatcctgctgtggcaaatacatcagaaagccataaagaatggtgaccagtgccatgaccatgccaacgccgccaatcacatgcgggatattgccgccgtcgataatagcgcgggcaaaaatgtaaacgcccactttcaccatcgatgcggcgtggagataggcgctgatcggtgttggcgcttccattgcgtccggtagccacgcttgcatcggtagctgggccgatttcccccacgcggcaaacaggatgccgccataaaccagataacgtgcgtcgccgtgtaactcgctcatcgcgctaagcgcaaacgttccggtctgcaaaaacagcgtggcggcggcaagatacaaccccaacgagccgatatgagtgataagtaacgcttttagtgcggaacgctgcgctttatcgctctggtaataactgatcaacgcccaggagcagccgcctgtaatttcaaaaaacaacaactgaccgagcagcgtcgaggagagtaccagtcccgccatcgcgccgataaacaccagtaaaaatgcgtaataacgattcgtgccgttatgcgggtgttcgcgatttttatccgtcagataacccgtggagtagatcgtgaccagcaaaccgagaaacaccaccacaaacagaatcagcgtactcacgcgatcaatgaccaggccaaacaacgccacatcccccacgttgaccaacgtcaacgtgacggcaactttatcggcctgataaaacgcggagatcagtgacaacatgcacagcgtggtcagcgcggcgaacaaaaccccccattcggcggcccgacgttgtggcgaaaacgaaacgaccagtgcgccgataaaaggcagcaataacgtcgtcagagcaagattttccatattccgtcagtgctccttacagaccggttaaccagaagacccatgcaagcgcagcaaggctgaagccaagccaggtcacatggtgaatgagtaaaaaacgcccgcgtgccagcgtgttttctgcgattgaggccagtacaaaaatcagcaaaaccttgagcagcgtaacgacaagtgaagtcagcaggcaggcgagagaaagttcttgcgcgcgcccaaagggcagaaacagggccacaaacagtgatgccatcacgacctgtttcagccccagcccccatttcgctagcgccagcccggcaccggaatattcggtcagcgggccttcctgtaattcctgttctgcttcagcaacatcaaagggaatttttcccatctcaatgaagcaggcaaaaccacaggccagtaacgccagtacggtggttagcggcgagttccagcccatcgccagcgtattgctgatcatctcgatatgcgtggaacctgctatcagcgccaataccagcagtgagagaataagcattggttcgaccagaatgccgagcgtcaactcgcgactggcaccgactcccgcaaacggacttccggtatccagcccggaaagagcaaagaaaaaacgaaacagggcaagaagatagataagggtgatcagatcgccgccgcccgcaaaaggggaaacggtaataaacagtggtaaggccatcgccagcaccagcatgctgctgattaatacccacggcatcaggcggaacatcagacctgaagatgtcggcgcaacttcctggcgtttaaacagtttgtggatatcgcgataatcctgccagatccccggcccgcggcgggagtgcatacgcgcgcgtatctgccgggaaatacccgtaaaaagtggggttagcatcagcagaatcacggcctgtgctaacgcaaaaatgaccagatatccgtcgcaaagagtttgtctcatggtgatttccttagacggcaatagcgattagcagcacaaccagtgcggcgaccacatacaggcaatagagacgaaagtcgccgctttgcagatgctgtatttctttggccagccgttgggtggcgctcacgatggggcggatcacccgctcatcccagaagggttctgtgctctgagccctggcggtgacgtgcgcaagacctttatttagcctcagcgtagggtcgagctgttgtcgtagacgaaatagcgcagaaaagaccacacgcagcggctgcatcacgccattgcctgacggggccatcgcattttcccagccgtagccgcatgcccaggcatctcctgtgcgacgaaacgctgcgcggcgcgaacgacaccacagccagtaaaggccaggcagcaaaggcatcgccagtagtaacagcaacagtaatgagggggtgacctgtgtatgaaacgtgccgggtacaagtgctattccgctggcgacagtggcgggaggggtattggtaaacgcatgggcaatatgcattatcttcggtgccagccaactggcactaagcgcaattaatacgcagagtgccgcgagcagtagcatggcgacgatcatcgtatttggcacttcctgtgcctcttcagcgtgtgtactgcgcggcgcaccacagaaagtaataccgtacatttttacgaagcacattactgccagcccaccagtgactgccagcattaccatagcaataggacccgcaagttgtagcgctacggcttccacacgacttagtgagaacagcgactgccaggtgtaccattcgctgataaaaccattcagcggaggaatggctgatatcgcgaggcaaccaatcaggcatgctgcggctgtccacggcatccgtttcgctagtgcccccattttttccatgtcgtgggtatgcaaacgcgaaataatcgctcccgcgccgagaaatagcagccctttgaacagcgcatggttgagcagatgaaacagtgcgccgagcagtccaaccacggtgagcagcgggtcgtgcagtgacagaccgaccatcgccacaccgactgccagcaaaataatgccgacgttttcgacggtactccaggccagcagccgtttgatatcctgttccgccagcgcatatagcacgcccaggagcgcggagattgcgccgatcgccatcaccagaatgccccaccacagaggcaaacccgtttgcgccagcagatccatcgctactttcaggatgccgaaaatacctattttgaccattacgccagacatcaacgccgaagcgtgcgatggtgcggcagggtgagcgcgcggcaaccagctgtgcaacggtatcatcccggctttcgcgccaaaaccgaaaaaggccagcagaaacaccgccgacgccagccccggagaaagtgaaagcgtgcgaaactggcaaaatcgaggctgccgctttcgcgccccatcagcaagaaggcgatcataatcagcaccgatccggcgtgggcgataaaaaagtagagcatgccagcgttgatcgacgttttatcctgcctggcaatgaccagaaaccaggaagacagcgacatcatttcaaacagcacgatgaaccaaaaagcgttgtccatcaccagcagggcaaccatcgatgcgatgaaaagattcataaagaagcccatcgccgccgcgcctttgccctcgtattcgcgcatataagtcaatgaatagagcgaacaaaccaccaccagcaaggagataaccagcaccataaatgccgagaggctatccattcgcagggttaaatcggcaaagtcaaaaggggtggcaaaatgggcgactaaagttacaccagcatgtaattgcgtaattccgctgatgatgccaatcacgccgcccaccagcgatgtgatgccggaaagcttaatagccagtctgtccagaccgagtaaaaacagcgaagccagactggcaaacagatagaggatcagcgaccaggttaataattgcagggcatccattagcgttgctcctgagtgagggaaaggggatcctccccgccattggcaaaccagcttgcggcaaggcgctgtttttctttcatctgacgttgcaggctatcgtcggtgatcagccgtaacgcctgattcgggcaagcgcgaacgcaggccggaccttctggcaagaaatcacacaggtcgcatttcaccgcgacggtctggacaccaggttcccagcgcagcaacgcatgttggggcagcacgttttcttcgccgtttttgagtgagccttcagcctgaaaaacatattgcgcatgggcattcaccggacggcttcctgaagcgctgattgcgccaaatgggcagaccacggcgcaaagcttgcagccaatacagaggctttcgttgagttggatcgcatcatccctctgagagatggcattgaccgggcagacctgcaggcaaggggcttcctcacagtgatgacacacgacaggggcagtgattgttgacgtcttcgccagggccaggcgcgggtgttgctgtaaaccttgcgttttatgcacgtccgaacaggcagcgagacaggtattacatcctgtacaccacagtggttcggccaccacaaagcggttcatgtcggctccttgaaaatgatatgaaacattgcatttcatattgcataaaggatgccattctgattaactcaatatattcaataagttatgtattaactggattctgaacggtacaaaaatgatggtcattaacgttcagcaaaaaatggattcgacacccgtgtcgcaggggaaagcgagaatgtgatcttcatcacgagaagtgaggtatgctggccgcaagcgcagccagcacggaatggagcaaagtaatcaggcgtgttctttcagccagttcagcacaacgtcgtggtgattgctggttttgaaatcgtcaaagacatgttcgattttgccatcagcgtcaatcaggaagctgatgcgatgaatgccatcgtaggttttgcccatgaaggacttttcaccccagacgccgaattgttcgcacacctggtggtcctcatcagacaggagcgtaaagttaagcagctctttttccgcaaaacgggagagtttttcgggtttatcggtgctgatacccagcacatcaacgcccgcttttttcaactcatccatgttatcgcgtaagccgcaggcctgtacggtacagccgggggtcatggctttcgggtagaaataaaccagaacacgctgtccctggaagtcggtcaaattaacttgttctccgtcttgatccggcaagctaaatttcggtgcgatatcaccggctttcagtggattcattacttaactccatcctgttcatcatgttgggaataattgacgacgttaatactgccttgtgcattgagttctgtacatagggctttgaacgcttgctcaatatttgctgcgtccgcagatgcggggctgtgggcggttatctgaatatgcaactgcgcagcccgttcattttcagcaggttgcgtgcgcgacaccagctccgcaatgttcatatgatgcgcgtcgaaaagtgctgtgaagcgttcaattaaatgcggggagtctgccacatcgacctgaacccagacagatgctggcattggcggacgcggacgcgccgtcgtgcgcttcatcacgattaaaagatccagttcggcacctttcaacggtaacgttgattcaatcagagtaatggcattccatgaaccggaaagcagcataataaacgtgaactcttctcccagcatcgccaggcgactgtcttcaatattacagccgcaactactgacatgacgggtgatggtgttcacaattccagggcgatcggcacccaacgcagtgatcaccagataatgttgcgatgacagtgtcaaactggttattcctttaaggggtgagttgttcttaaggaaagcataaaaaaaacatgcatacaacaatcagaacggttctgtctgcttgcttttaatgccataccaaacgtaccattgagacacttgtttgcacagaggatggcccatgttcacgggaagtattgtcgcgattgttactccgatggatgaaaaaggtaatgtctgtcgggctagcttgaaaaaactgattgattatcatgtcgccagcggtacttcggcgatcgtttctgttggcaccactggcgagtccgctaccttaaatcatgacgaacatgctgatgtggtgatgatgacgctggagctggctgatgggcgcattccggtaattgccgggaccggcgctaacgctactgcggaagccattagcctgacgcagcgcttcaatgacagtggtatcgtcggctgcctgacggtaaccccttactacaatcgtccgtcgcaagaaggtttgtatcagcatttcaaagccatcgctgagcatactgacctgccgcaaattctgtataatgtgccgtcccgtactggctgcgatctgctcccggaaacggtgggccgtctggcgaaagtaaaaaatattatcggaatcaaagaggcaacagggaacttaacgcgtgtaaaccagatcaaagagctggtttcagatgattttgttctgctgagcggcgatgatgcgagcgcgctggacttcatgcaattgggcggtcatggggttatttccgttacggctaacgtcgcagcgcgtgatatggcccagatgtgcaaactggcagcagaagggcattttgccgaggcacgcgttattaatcagcgtctgatgccattacacaacaaactatttgtcgaacccaatccaatcccggtgaaatgggcatgtaaggaactgggtcttgtggcgaccgatacgctgcgcctgccaatgacaccaatcaccgacagtggtcgtgagacggtcagagcggcgcttaagcatgccggtttgctgtaaagtttagggagatttgatggcttactctgttcaaaagtcgcgcctggcaaaggttgcgggtgtttcgcttgttttattactcgctgcctgtagttctgactcacgctataagcgtcaggtcagtggtgatgaagcctacctggaagcggcaccgcttgcggagcttcatgccccggctggaatgattttgccggtgacctccggtgattatgcaatcccggtgaccaacggtagtggtgctgtcggtaaggcgctggacattcgtccaccagcccagccgctggcactggtttctggcgcgcgtacccagttcacgggcgataccgcttcattgctggtggaaaatggtcgtggcaatactctgtggccgcaggtggttagcgtgctgcaggcgaaaaactacaccatcacccaacgtgatgatgctggtcagacactgaccaccgattgggtacaatggaaccgtctggacgaagacgagcagtatcgtggtcgttatcaaatctctgttaagccgcagggttatcagcaggcggttacggttaaactgctgaacctggaacaggcgggcaaaccggttgcagacgcggcttccatgcagcgttacagcacggagatgatgaacgttatttccgccggtctggataaatctgccactgacgccgcgaacgctgcgcaaaatcgtgcctccaccactatggacgtacaaagtgcagctgatgacaccggtttaccaatgctggtcgtacgcgggccgttcaatgtggtttggcaacgtctgccagcggcgctggaaaaagtgggcatgaaagtgaccgacagcacccgttcgcagggcaacatggccgtaacttataagccgctgtctgacagcgactggcaggaactgggcgcgagcgatccaggcctggcatccggtgactataaactgcaggttggcgatttagataaccgcagcagcctacagttcatcgatccgaaaggtcatactctgactcagagtcagaacgacgcgctggtagctgtcttccaggctgcgtttagcaagtaaaaatacagggctggaatcatccggcccttttttctgatatgatacgcaaacgtgtgcgtctgcaggaaaacgcgattttagcggtaattcgcacgaaatttgtttgtcggacgtagttcggataaggcgttcacgccgcatccgacaaaacatccggcacaccagacagcaaaagattttaaaacgttaattcacacccaggagtgataaagatgcaaaagcaagctgagttgtatcgtggtaaagcgaaaaccgtatacagcacggaaaacccggacctgttggtgctcgaattccgcaatgatacgtcagcaggggatggcgcgcgcattgagcagtttgatcgcaaaggtatggtgaacaacaagttcaactacttcattatgagcaaactggctgaagcgggtatcccgactcaaatggagcgtctgctctccgataccgaatgtctggtgaaaaagctggatatggtgccggttgagtgtgtcgtgcgtaaccgtgctgctggctctctggtgaaacgtcttggaatcgaagaaggtattgagctgaacccgccgctgttcgatctgttcctgaaaaacgacgccatgcacgatccgatggtcaacgaatcttactgcgaaacctttggctgggtgagcaaagagaacctggcgcgtatgaaagagctgacctacaaagcgaacgacgtgctgaaaaaactgttcgatgatgctggtctgattctggtcgacttcaagctggagtttggtctgtacaaaggtgaagtggtactgggcgatgagttttccccggacggcagccgcctgtgggacaaagaaacgctggagaaaatggacaaagaccgtttccgccagagcctcggtggcctgatcgaggcctatgaagccgtcgcccgccgcctgggtgtacagctggactgatttttctgttcatcatcttgccgtgcagctggcacggcaagacaaccgctctcggaatatatgcattgaacgctcattcctccgccatttcatcccgctttcctgtggtaatcttcctctgaaccacctacgatcatttctataatgaatatattgttgaggtatctatgcgttggcaagggcgacgtgaaagtgacaatgttgaagacaggcgcaacagctctggtggtccgtctatgggcggtcccggttttcgcctgccgagcggtaaaggcgggctgattttactgatagtcgtgctggttgcaggctactatggcgttgatttaaccgggttgatgaccgggcagccggtttctcaacagcaatcaacgcggtcaattagcccaaatgaagacgaagccgcaaaattcacctcggtgattctggcaaccacggaagacacctggggacaacagttcgaaaagatgggtaagacctatcagcaaccgaagctggtcatgtaccgtggaatgacgcgtaccggctgcggggcgggccagtccataatggggccgttctattgcccggcggatggcacggtttatatcgatctctccttctatgatgacatgaaagacaaacttggcgcggatggcgattttgcccaggggtacgttatcgcccatgaagtcggtcatcatgtgcagaaactgttaggcatcgagccgaaagttcgtcaactgcaacaaaacgcgacgcaggcggaagtaaaccgcttatctgtgcgtatggaactccaggccgactgttttgccggtgtctgggggcatagtatgcagcagcaaggcgttctggaaaccggcgatctggaagaggcgctgaacgcggcgcaggccatcggcgatgaccgtttacaacagcaaagtcaggggcgagtagtaccagacagtttcactcatggcacttctcagcaacgctacagctggtttaaacgtggtttcgacagcggcgatccggcacaatgcaatacttttggtaaaagcatttaacttccggggcagggatggctgaactgactgcgcttcacacattaacagcgcaaatgaaacgtgaagggatccgccgcttgctggtgttgagcggggaagagggttggtgttttgagcatactcttaagttgcgtgatgccttacctggcgactggctgtggatttcgccgcggccagatgctgaaaaccactgttctccctcggcactacaaactttacttgggcgcgagttccggcatgcggtattcgacgcccgccacggctttgatgccgctgcctttgccgcacttagcggaacgttgaaagcgggaagctggctggttttgttactccctgtatgggaagagtgggaaaaccaacctgatgccgactcgctgcgctggagtgattgccctgaccctattgcgacgccgcattttgtccagcatctcaaacgcgtacttacggcggataacgaggctatcctctggcggcaaaaccagccattctcgttggcgcattttactccccgtactgactggtaccccgcgactggcgcaccacaaccagaacaacagcaactcttaaagcagctaatgaccatgccgccgggcgtggcagcggtaacggctgcgcgtgggcgcggtaagtcggcgttggcagggcaactcatttctcgtattgcgggcagagcgattgtcaccgcgcccgcaaaagcgtcaacggatgtactggcacaatttgcgggcgagaagtttcgctttattgcgccggatgccttgttagccagcgatgagcaagccgactggctggtggtcgatgaagccgcagccatacctgcgccattgttgcatcaactggtatcgcgttttcctcgaacgttgttaaccactacggtgcagggctacgaaggcaccggacgtggttttttgctgaaattttgcgctcgctttccgcatttacaccgttttgaactgcaacagccgatccgctgggcgcagggatgcccgctggaaaaaatggtcagcgaggcactggtttttgacgatgaaaacttcacccatacaccacaaggcaatattgtcatttccgcatttgaacagacgttatggcaaagcgatccagaaacgccgttaaaggtttatcagctcttgtctggtgcgcactatcggacttcgccgctggatttacgccggatgatggatgcaccagggcaacattttttacaggcggctggcgaaaacgagattgccggggcgctgtggctggtggatgagggtggattatctcaacaactcagtcaggcggtatgggcaggttttcgtcgcccgcggggtaatctggtggcccagtcgctggcggcgcacggcaacaatccactggcggcgacattgcgtggacggcgggtcagccggatagcagttcatccggctcgtcagcgggaaggcacagggcggcaacttattgctggtgctttgcaatatacgcaagacctcgactatctttcggtgagttttggttacaccggggagttatggcgtttctggcaacgctgcggttttgtgctggtgcggatgggtaatcatcgggaagccagcagcggttgctatacggcgatggcgctgttaccgatgagtgatgcgggtaaacagctggctgaacgtgagcattaccgtttacgtcgcgatgcgcaagctctcgcgcagtggaatggcgaaacgcttcctgttgatccactaaacgatgccgtcctttctgacgacgactggcttgaactggccggttttgctttcgctcatcgtccgctattaacgtcgttaggttgcttattgcgtctgttacaaaccagtgaactggcattaccggcgctgcgtgggcgtttacagaaaaacgccagtgatgcgcagttatgtaccacacttaaactttcaggccgcaagatgttactggtccgtcagcgggaagaggccgcgcaggcgctgttcgcacttaatgatgttcgcactgagcgtctgcgcgatcgcataacgcaatggcaattatttcactgactccttcaattttatctcatggtcattgtgagtcagcggcgtaaaattaatgacatcagttaaggagttcgccatgaaacatgaccattttgttgttcaaagcccggataaacctgcgcaacagttgttactgcttttccacggtgtcggggataacccggtggcaatgggggaaataggcaactggtttgcaccgctgtttcctgatgcgctggtggtgagtgtcggtggcgcggagccgagcggtaatccggcggggcgtcagtggttttcggtgcagggtattacggaagataatcgccaggcgcgtgtggatgcgatcatgccgacgtttattgaaacggtgcgctactggcagaaacagagcggagtaggggctaacgccacggcgctcatcggtttctctcaaggcgcgattatggtgctggagagcattaaagccgaaccgggccttgcttcacgcgtcattgcttttaacggacgctatgcgagtctgccggaaactgcgtctacagccacgacaattcacctgattcatggcggtgaagatccggttatcgatctggcgcatgcggttgcggcgcaggaagcgttaatcagtgccggtggtgacgtgacgctggatatcgtggaggatttaggccatgcgatcgacaatcgcagtatgcaatttgccctggatcacttgcgttataccattccgaaacattatttcgacgaagcgctaagtggcggtaagcctggcgatgatgatgtgattgaaatgatgtaaaagacagattacctggcctgataagacgcgtgagcgtcgcatcaggcatcgttcaccattgccggatgcggcgttaacgccttatccggcctacggttgagcactcagcttacttcttcggttgatcctttttcggccagtcgtcgtcatcgtcccacttatcgttgaaatcacgatgcgggggaagctccggcttgttggcgagaaatttcttatggtcgacgcgcttgagatctttaatcacgttcagcaggacgcctaccaaaaagacaatcaccagaatccaccaatatttagccagccagtccatgcttatttcctcttgcagaaccactcatcaggcgacgagctgttccatgatacgttgatacatacgggcaagtagctgcaggtcggcagcgttcacacattcattaattttatgaatagtggcattgaccggcccgagttccaccacctgcgcccccatgcgggcaataaagcgcccgtcggacgttccgcctgtggtcagtagctgcggtttaatttcattatagtgctcaaccgcgttaacgaccgcatccaccagtttaccgcgcgcggtcaaaaatggctgcccggaaagccaccaatccaccgtatagcgcagttgatgtttttcaagcagggcaagcacctgcgctttgatcatctcatcagtcagttcggtgctgaagcggaagttaaactgcacaaacagttcacccggaataacgttgttactgcccgttcccgcctgaatattggcaatctgcatactggtcgccgggaagaattcattgccctgatcccactcaatagccactaattcattaaggaaaggtgctgcgcgatgtaccggattgtcagccagatgtgggtaggcaacatgcccctgaacgccatgaatggtaaggttgcaggttaatgatccgcgacgaccatttttcaccacatcacctaccacttcgatactcgacggttcgccaaccaggcagtaatcgagacgctcattacgtgccattaacgcttcgacgacttttaccgtaccgttgtgggcactggcttcttcatcagaggtgatcagaaatgccagtcgccccgtatggttgggatgttgtgcgacaaaacgttctgccgccaccaccatcgccgccagcgagcctttcatatctgccgcaccgcgcccgaataacatgccgtcacgaatggtgggttcaaacgggggattgatccaacgatcggcgtcgccaggcggcaccacgtcggtatgcccggcaaaggctaacgtttcaccctgcccacgccatgcccaaaaattctgcgtatcggcaaagtccatgcgttcaacggtaaaaccgatcgcctgcaaacgttcaatcaacaaagcctggcatcctgcatcatcaggactcagggaagggcggcgaataagctgttgtgtcagctcaataaccgggcacgacatagactacacctcatggaaaaattgctgataactggaatcactgaaacccagcagcataggcttaccgggcacgcagagcaatggacgtttgataattgcaggcatttcagtcattaatgccgccgcagaggccgcatcggtgattttattgcgggtggtttcgtccagtttacgccaggttgtaccacgggtgttgagtaacgcttcccagcctaattcgttgataaaatcgttcaataattcgctgtccagcccatcgacgcggtaatcatgaaaacgatagtcgatgttattggcttccagccaacggcgagcctttttaatggtgtcacaatttttgataccgtaaagtgtaaccataatgaatcctttttcgatttatgagaataaatactcatttaagggtgaaaacattttgcctgcaaatgattatcaggaaatataacattatcgaagtattcaaattaacaactattaaataatattaaacatttttaacgtaaacattaagaatattcatcttgttatctgtctgtattttaaccagaattaaatcagtattagatgccgtatgaatatctcgaaatgttgctgtgtatcacatacaaatcatcaccgcaggaccatagtatttacataagatttgtcccccggaggtagtcatcgcagcaatcgagtaaattagcttcaccacggtatattgtttccgtagaatacccataattataagagaggttgttatgattgaacgtgaactggggaactggaaagactttatcgaagttatgcttcgtaagtaattcctgagacaaagtacaaacagcaagaacacgctgagcaggttcttaatcggaaagttgaaaaaggcgacacattggcatgtcgccttttttattgcttattccgggcgcggcttcagcgggaagcggcggcgcaccagcacaaagaacagcggcacgaagtaaatagccagaatagtggccgaaatcatcccgcccattacgccagtacccaccgcatgctgaccaccggaaccggcacccgtgctggttgccattggcaatacgccgaagataaatgccagcgaggtcatcagaatcgggcgtaaacgctgacggcaggcgtggagcgtcgcttcaaacaggtcgtggcctttttggttcatctcgttagcaaactcgacgatcaggatggcgtttttcgccgataaaccaatgaccgttaacaggcccacctggaagtaaacgtcgttttccagcccgcgcatccaggttgccagcagcgcgccgattacccccagcggcacgaccagcattaccgagaacggcaccgaccagctttcatacaacgcagccagacacaggaataccaccagcaaggaaatggcgtacagcgccggagcctgcgcgccggaaagccgctcctgatacgacatcgccgtccactccagaccaaagccgtttggcagctgcttcactaacgattccataatatccatcgccgtaccggtactgacccccggtgcggcttccccaacaatctcaaccgcagaataaccgttatagcgttccagacgcggcgagcctgtttcccagcgtgaggtcgcgaaagcagagaagggcaccatgccgccatctttatttcggacataccagagattgatgtcatctggcagcatgcgatacggcgcagctgcctgcacatagactttcttcacgcgaccgcgatccataaagtcattcacatagctcgaaccccaggcggtttgcagtgtgtcgttaatatcgtcgatagcaacgcccagcgcctgagctttacgctggtcgatatcaatctgcaactgcggactgtcgtcgaggccgttatggcgcacacgggttagctccgggttttccgccgccagcgccagcaactgattacgtgctgccatcagcgcatcgtgacccgctccagcgtggtcctgcaactccatatcaaaacctgcagaactaccaagaccgctaattgctggcgggctgctggcgataacgcgagcttctttaatttggttaaacgccttcgttgcacgctcgataatggcaaacgaggtgccggtcttactgtcgcgttcgctccagtctttcaggcggataaacattcgcgccacgttttgcccgttacccccagggccagaaccaacggtggcaaacaccgacatgatgttgtctttttcatgggtgaagtagtatttctcgatttgctcaacgactttcagggtctgttgttgcgttgaaccgctgggcaactgtaccgaggtagtaaacatgccacggtcttccagcggtaagaacgacgtcggcaaacgcaggaacaggaacaccatgccgccaagcagcaggacataaatcacaatccagcgcaggctacggtggagaattttcgccacccctttttcgtagcgttcggcgttgcggttaaacatctggttaaaccaggcaaaaaagcctttttgcccatgatgctcaccttttttcagtggcttaagtagtgtggcacacagagccggagtgaggatcatcgctaccagtactgacagcaccatcgccgcaacaatggtaatagagaactggcgatagatggcaccggtggtgccgccgaagaaggccattggtacaaataccgccgaaagaaccatcgcaatcccgaccagtgccccctggatctgccccatcgatttacgtgtggcttcgcgaggagtgagtccttcctcactcataatacgttcgacgttttccaccaccacgatggcgtcatccaccagcagaccgatcgccagcaccatcgcgaacatggttaaggtgttgacgctgtaaccgaaggcgtaaagtacggagaaggttcccatcaacaccaccggcacggcgatagtgggtatcagcgtggcgcggaagttttgcaggaacagatacataacgaggaaaaccagagcgatagcttccagcagcgttttcaccacgtcttcaatggaggctttaacaaacgaggtggtttcatacgccaccttgtattccagtccatgcgggaaatactgcgccagctcgtcgagacgattgagcaccagctccgctgtcgccatttcgttagcgccggaggccagttttacccccagcccggaggctggcttaccattgaagcggctaagataatcgtatttctccgcccccatttcgacggtggcgacatcgcccagccttacctctgagccgtcctgattgacccgcaaggtgatatcgcggaactgttctggtgtttgcagcagtgactgggcgttaatggtggcgttgagcgcctgcttatcgacggaaggtgtaccaccaagttgcccaaccgcaatctgcgcgttctgtgactcaatggcatcagtgacatctttagccgtcatctggaaactgttgagtttcgccgggtccagccagatacgcatggaatattgcgaaccataggcatcgatatccccgacgccattcacgcggcttaacgggtcctgaatattactggcaacataatcagcaatatcctgtttatccatcgaaccatcggtagagacgaaggcaatggtcagaatgttggtatcgccggttttacgcaccgtcacgccctgattttgcaccgcctgcggtaactttcgcatggctgattgcagctggttttgtacttgctgcacggcttcgtccggatcggtgcctgctttaaaacttaaagtgacagatgcctgaccggtgccactgctctgagatgacatatacatgagattatcgaggccggtcatattttgctcgataacctgggtcacggtgttttccagcgtctgggccgatgcgccgggatagttagcggtcactcgcacattcggtggcgcgagatcggggtattgttcaacgggcaatgaaaaaatcgccagggtacctgtcagacacaacaggattgccagcacccaggcaaaaatggggcgatcaataaagaaattcgccattaaaagaggacctcgtgtttctgcgtatcgttgtaggcttgacttgcttcactgtagcggcaaggtacgagccaatcgtggagaaaaaaaggagttaatgtaaattatcatgcccttttatactgaaccttaagtgcaagtattctttggtcagtaggaggcattacattaactgactttcctcaccctccgcagagcgaaagctaatactcactaacgtgccgccgccggaaggttgtgaaaaagtcagcgtcccacctagccgttccgcgcgttcgcgcatgatattcagaccataatgaccttcgggttctttcggttcaccgataccaatcccgttatcacggatataaaccgtgtgattgccgtccggcgcggtgacgcaactgacggcgatttcgctggcgttggcgtgcttcatcgcattcagcaccgcttcgcgaataatttgcaacaaatgcacctgcatttgcgcatccagtgccagggttggcagacggcagtcgagggtcagtttggcgctggtttgattttgtaacgtatccagcatttccctcaatgcggaggggagatccgcctgctgcagcgtcaggcggaaagtagtcaacagctcgcgtaactgccgataagcatcattcaacgcctgggaaaaatcggccatgatactttgtgcggtggcgttatcttccggtatcgaacgcttcagtaacgtcaactggatacgtaagtaagaaagtacctgagccagcgagtcgtgcaattcgcgggcgatggtcgcacgttcttccatcaacaataattgctgaaaatgcttctgcgcctgattaaagtacaaaccgcgtcccagcatcgacgaaacgctgttaagcagcggttctgatgatgaaacgtgactattttgccagtgcagttcgccgtaaaccgtctcttgcattgtcaccggtaaaatctgcatcggcaattccgggtttggttgcccttcgctaatccgccagttttcaccgacatttaactccagatattcagccgcttcattgtcgcgaacaatctgcaaaatatggcggaaacaatgcacatcaatctggctagtgttcagcgcctgcgaacactgatacaacacctccagacgacgcttggcctcgtggagatcgcgggtcttttcttctactgacgcttccagcgaacggtacaatttatgcagctcgctcgacatctggttaaaggtttttgcaagcagaccaagctcattcggcaggttggtatccagcggcggcgagtcgaactgcccgtgttcaatacgctgactggcggtaaccagctgattcagcggggcaaccacctgatggcgtatgcggcgcaaagtaaaaaagaccagcgtgaaaataccgatgccgccagccagggaaatcgccaccaccagcagcattttgcgttcagcgtagtgctgtaaagccagtacgaacaggtctatctgattaacataattattaatattggcctgataccacggcaaatcgcccttgctgagccgattattcatctccagccagttggcattcagatgcgcatagcgagtttttactgcttctggcacataccagacgttgaggttggttaataccggtgaatgcagtgcctgctgaaataactggcgatgtgcattgagttgtggactgccactttgcaagtcgtagcccaggcggtaactctgcatacgcagcgatccggcaatattgatagcctcagcgtcgcgcaaactgctcgccagagttagcagagcgatacccgtggaaagaatcgacagcagcacaatgtaaaaaaaggcccgggccagactggccgagacgggtcgtttaacaatcacacgcgtcttctccacaaaaaatcattaatgttccagttcgctgaaacgcaatttagtcagtgatgggattatttgatctgccacagtttatagcgaaatagttacttattctgggcacatgaacattgccgattcccctgtaagtcgggtaataacaacactcatataaagaataaggtttttacaaccaaaaaagaaggtcgttatgaatcgttttattatggccaacagtcagcaatgtctgggttgtcatgcttgtgaaatcgcctgtgtcatggctcacaatgatgagcaacatgtcctgagccaacaccattttcatccccgaattacggttatcaaacatcaacagcaacgtagtgcagtgacctgtcaccattgtgaagatgcgccctgcgcccgtagctgccctaatggcgcaatcagccacgttgatgacagcattcaggtcaatcagcaaaagtgtattggctgtaaatcctgcgtggtggcctgtccttttggtacgatgcaaatcgtcctgacacccgtcgcggcaggaaaagtaaaagccacggcgcataaatgcgacctttgtgcggggcgcgaaaacggtcctgcctgtgttgagaattgcccggcggacgcgctgcaactggtcactgacgtcgcactctccggcatggcgaaatcccgccgcttgcgcaccgcgcgtcaggaacatcaaccgtggcatgccagtaccgcggcgcaagaaatgccggtaatgagtaaagtcgaacaaatgcaggcaacgcccgcgcgtggcgagccggataaactggcgattgaagcgcgcaaaaccggttttgatgaaatttatctgccatttcgcgccgaccaggcacaacgggaagcctcgcgctgccttaagtgcggcgagcacagcgtttgtgaatggacctgcccgctgcataaccatataccgcagtggattgaactggtgaaagccggaaacatcgacgccgccgtcgagctttctcaccagaccaacaccctgccggaaattaccggacgcgtttgtccgcaagaccgtttgtgtgaaggtgcctgtactattcgcgatgagcacggcgcggtaactatcggcaacattgaacgctacatttcagatcaggcgttggcgaaaggttggcgtcctgacttaagccatgtcaccaaagtggacaagcgggtggcgattatcggtgcaggtccggcagggctggcctgtgcggatgttctgacccgcaatggcgtgggggtgacggtgtacgatcgccatccagaaatcggtggcttgctcactttcggcattccttctttcaaactggataaatccctgctggcacgccgtcgggaaatcttcagcgcgatggggattcacttcgaactcaattgtgaagtgggtaaagatgtctctttggattcgcttttggaacaatacgacgcggtcttcgttggcgtaggcacttaccgttccatgaaagcgggtttacccaatgaagatgcgccgggcgtttatgacgcgctgccgttcctcattgccaacactaaacaggtgatggggctcgaagagctaccggaagagccgtttatcaataccgccggacttaacgtcgtggtactgggcggcggcgacaccgcgatggactgtgtgcgtaccgcactgcgccacggcgcgagtaacgtcacctgcgcttatcgtcgtgatgaagctaacatgccaggctcgaagaaagaagtgaagaacgcccgcgaagagggggccaacttcgaatttaacgtccagccggtggcgcttgagctgaatgaacaaggtcacgtctgcgggattcgtttcctgcgcacgcgtcttggagagccggatgcccaggggcgtcggcgtccagtgccggtggaaggcagtgaatttgtcatgccagccgacgcggtgattatggcgtttggcttcaatccgcacgggatgccgtggctggagtcgcacggtgtaacggtagacaaatggggccgcatcatcgcggatgtggaaagccagtaccgttaccagaccaccaatccgaaaatcttcgctggtggtgacgccgtgcgtggtgcggatctggtggttaccgcaatggcagaaggacgtcatgcggcacaggggattattgactggctgggggtaaaatcagtcaaatctcactgatagcctgcgcagacaaacccgacttcacagcgtaagataattgttcatttcgcgctgtggagtcggtatgacgcaacaaatcaccctcattaaagacaaaattctctccgataactatttcaccctgcacaacattacttacgatctcacgcgcaaagacggcgaagttatccgccataaacgtgaagtgtacgatcgcggcaatggtgcgacgatcctcctgtacaacacgaagaaaaagaccgtggttctgattcgtcagttccgtgtcgctacctgggttaatggcaatgaaagcgggcagctgattgaaagctgcgccgggctgctggataacgacgaaccggaagtgtgtattcgcaaagaagcgattgaagagacgggctatgaagtgggtgaagtgcgcaaattatttgaactgtatatgtcgccaggcggtgtgactgagctaatccacttttttatcgccgaatacagtgacaatcagcgcgctaacgccggtggcggtgtcgaagatgaagatattgaagtgctcgagctgccgttcagccaggcgctggagatgatcaaaaccggcgagatacgtgacggtaagacggtgttattgcttaactatttgcaaacgtcacatttaatggactgaaaaataacaataatatttcgttgtttattattggctcaatccgacaaatccgattgagccgcgctacctgcgcaacgaagatacgacttgtgctgtttgtttgaacttctggggtcgtaccgtccatgcgctatcgcattttccttctcttttttttcgctttgttgccgacgtctttggtgtgggcggcaccagcgcaacgggcgttttccgactggcaggtcacctgtaataaccaaaatttctgcgtggcgcgtaatacgggcgatcataatggactggtgatgaccctgagccgcagcgccggggcgcataccgatgccgttttacgtattgagcgcggcggattgaagtcgccggaggcgtcagaaggggagatagcgccacggctgctgttagatggcgagccgttggcgttaagtggtgacaagtggcggatttcaccatggttattagtaaccgatgatacggcaaccatcaccgcgtttttgcagatgattcaggaagggaaggcaatcaccttacgcgatggcgatcagaccatttctctgagtggcttaaaagcagcgttgttgtttattgatgctcagcaaaagcgcgttggcagtgaaaccgcgtggatcaagaaaggggacgaaccgccgctcagcgtaccgcccgcgcctgcgctgaaagaggtcgcggtggttaacccaacgccgacgccactctcactcgaagaacgcaacgatttgctggattatggaaactggcggatgaatggtctgcgctgctcgcttgatccattgcgtcgtgaggtgaatgtcactgcgctgactgatgataaagcgctgatgatgattagctgtgaggcaggggcctataacaccattgatttggcatggattgtgtcgcgtaaaaagccactagcttcgcgcccggttcggttgcgtttgccgttcaacaacggtcaggagacgaatgaactggaactgatgaacgcaacatttgatgagaaatcgcgtgaactggtgaccttagcgaaagggcgcggattaagcgattgtggcattcaggcgcgctggcgctttgacggtcagcgttttcgcctggtgcgttacgccgcagaacccacctgcgataactggcatgggccagacgcctggcccacgttgtggatcacccgttaaacaaaatggcgggacatgtaggccggataagacgctgtaggccggataagacgcgtcagcgtcgcatccggcaatcagcatccggcaatcaccatcaggcacctttcactcccagcaccttatgcgcttttgccacaatattctcggcggtaaagccaaagaacgggaacagcttatccgccggagcagattccccgtaacccgtcatcccgacaattgcccctttcagaccaacatacttgtaccagtaatcggcaatacctgcttccaccgccacgcgagccgcaacgttagaaggcaacaccgactcccgatattcctcatcctgggcgtcgaaaatatcggtcgagggcagggaaactacgcgtacattgcgaccttctcctgctaatttctctgccgcttgcagggtaatttccatctctgaaccggtggcaatcagaataatatctggcttaccgccgctgtctttcagcacataaccgccacgagcaatctctttaacctgatccggcgtacgttccacctgggccagattctgccttgagaggatcagtgccgtcggtccgttgtggcgctcaaccgccagcttccagcccaccgccgcttccacctgatcgcacggtcgccaggtgctgaaatttggcgttaagcgcaggctggccagttgctcaacagcctggtgcgtcggaccatcttcgcccaggccaattgagtcgtgggtataaaccataatctgccgcgctttcatcagtgccgccatccgcgcggcgttacgggcgtattcaacaaacatcaggaacgtcgcggtatacggcacaaagccgccgtggtgcgcgatgccgttggcgatagcggtcatgccaaattcacgcaccccgtagtgaatgtagttgcccgctggatcttccttcagcgaaacagaacctttccagatggtcaggttgctgggagccagatccgccgaaccgccgagcaactcaggcagcatcggcccgtaagcgttaagcgtattttgcgaagccttacgggtagcgattttcgccggatttgcctgtaactcattgatatatttctgagtcgttttctcccagtccttcggtaaaccaccgctcatccgtcgggtaaactcttctgccagttgcggatgagcctttttataggcggcaaacttctcattccagctctgctgcgctttttcgcctttttcacgggcatcccaggcgtgataaatctctttagggatctcaaatggcggatggtgccagcccagtttttgccgtgccagcgccacttcttcttcccccagtggtgcgccgtgcgcctcttccttacctgctttattcggcgaaccaaagccaatcaccgtacggcagataatcagcgacggcttatctttcacgctttgcgcttcaaggatcgcttccttcaccgcctgcggatcgtgaccgtcgatttcatggatcacatgccagtgataggcttcaaaacgttttgccgtatcgtcggtaaaccagccttctgtttcaccgtcgatggaaataccgttgtgatcgtaaaaaccaatcagcttgcccagtcccagcgtgcctgccagcgaacagacttcgtgggaaataccttccatcaggcagccgtcgcccataaacacataggtgaagtgatcgacgatctcatggtctggctggttaaactgcgccgccagtgtacgctctgctatcgccagcccgacggcgttcgccaaaccttgtccaagcgggccggtggtggtttcaacgcctggcgtatagccaatctccgggtggcctggggttttcgaatgcaactgacggaagttcttcagttcttccagcggcaggtcgtaaccggtcagatgtagcaaactgtagagcagcatcgacgcgtgaccgttggaaagaataaagcggtcgcgatcataccaggttgggtcggtagggttatgtttaagaaaatcgttccacagcacttcggcaatatcagccatgcccatcggcgcgccgggatgaccagagttggctttttgtaccgcatccatactgagtgcgcgaatcgcattggcaaggtcttttcgggacatataacactccgtggctggtttatagtttggcggcaagaagatcttccagtttgcgttgatcaacggcgaacagacgaatgccttcagacagtttttctaccgccatcgcatcctgattgtgctcccaacggaactccgcttcgctcatgggagctgggcgtgggaacgtctgagaaggtgggattaatttacgtaccactggcgaaactttttcctgcagctccttcagtaaattcggtgcgatagtcagtcgatcgcagccggttaaggcgaggatttgttcggtgcgacggaagctcgcgcccatcacaatggtttcatagtggtgttgcttatagtagtcgtagatattgcgcaccgatttaacgcccggatcttcttccaccacatacgggtccatcggcttgcgtgcctgataccagtcataaatacgcccgacaaacggcgaaatcagaaaaacgcctgcttccgcacaggcccgtgcctgtgcaaaagaaaacagcagcgtcaggttgcagttaataccttctttttccagctcttctgccgcgcgaattccttcccaggtcgaagccagcttgatcagaatgcgtgatttctcaacgccttgttgctgatacaagtccaccagatggcgcgccttctcaatactcttttctttatcaaaagagaggcgtgcatcaacttctgttgacacgcgaccgggtacgattttgaggatttcagcaccgaaattgaccgccagtttgtcacacgctgcgaccacctgttgttcctgggtcttgccattttttttaccccaggcgatagcatcgtctattaaatgctcatattgtgataatccggcagctttgagtaacagcgaaggattggtggtggcatcctggggatgataatggcgaatggactcaatatcgccgctgtctgccacgacagtggtgaactgtttgatgccgtctaactcgttcataggaaatactccttgaaaagtaaagtgttagatgagtgcgttaattcacacttctgagaaatttcgctaaacgcatcaaaaaagcatagcagacaggcatggtattgctggattaagcaggtaacatcagtgttataggattattaccaaaacattatattaatggtgagagtttggacttgctcaaagtctgtagactccggcagggtaataatgtgcgccacgttgtgggcaggggctgttgcccacacactttatttgtgaacgttacgtgaaaggaacaaccaaatggatgaccagttaaaacaaagtgcacttgatttccatgaatttccagttccagggaaaatccaggtttctccaaccaagcctctggcaacacagcgcgatctggcgctggcctactcaccaggcgttgccgcaccttgtcttgaaatcgaaaaagacccgttaaaagcctacaaatataccgcccgcggtaacctggtggcggtgatctctaacggtacggcggtgctggggttaggcaacattggcgcgctggcaggcaaaccggtgatggaaggcaagggcgttctgtttaagaaattcgccgggattgatgtatttgacattgaagttgacgaactcgacccggacaaatttattgaagttgtcgccgcgctcgaaccaaccttcggcggcatcaacctcgaagacattaaagcgccagaatgtttctatattgaacagaaactgcgcgagcggatgaatattccggtattccacgacgatcagcacggcacggcaattatcagcactgccgccatcctcaacggcttgcgcgtggtggagaaaaacatctccgacgtgcggatggtggtttccggcgcgggtgccgcagcaatcgcctgtatgaacctgctggtagcgctgggtctgcaaaaacataacatcgtggtttgcgattcaaaaggcgttatctatcagggccgtgagccaaacatggcggaaaccaaagccgcatatgcggtggtggatgacggcaaacgtaccctcgatgatgtgattgaaggcgcggatattttcctgggctgttccggcccgaaagtgctgacccaggaaatggtgaagaaaatggctcgtgcgccaatgatcctggcgctggcgaacccggaaccggaaattctgccgccgctggcgaaagaagtgcgtccggatgccatcatttgcaccggtcgttctgactatccgaaccaggtgaacaacgtcctgtgcttcccgttcatcttccgtggcgcgctggacgttggcgcaaccgccatcaacgaagagatgaaactggcggcggtacgtgcgattgcagaactcgcccatgcggaacagagcgaagtggtggcttcagcgtatggcgatcaggatctgagctttggtccggaatacatcattccaaaaccgtttgatccgcgcttgatcgttaagatcgctcctgcggtcgctaaagccgcgatggagtcgggcgtggcgactcgtccgattgctgatttcgacgtctacatcgacaagctgactgagttcgtttacaaaaccaacctgtttatgaagccgattttctcccaggctcgcaaagcgccgaagcgcgttgttctgccggaaggggaagaggcgcgcgttctgcatgccactcaggaactggtaacgctgggactggcgaaaccgatccttatcggtcgtccgaacgtgatcgaaatgcgcattcagaaactgggcttgcagatcaaagcgggcgttgattttgagatcgtcaataacgaatccgatccgcgctttaaagagtactggaccgaatacttccagatcatgaagcgtcgcggcgtcactcaggaacaggcgcagcgggcgctgatcagtaacccgacagtgatcggcgcgatcatggttcagcgtggggaagccgatgcaatgatttgcggtacggtgggtgattatcatgaacattttagcgtggtgaaaaatgtctttggttatcgcgatggcgttcacaccgcaggtgccatgaacgcgctgctgctgccgagtggtaacacctttattgccgatacatatgttaatgatgaaccggatgcagaagagctggcggagatcaccttgatggcggcagaaactgtccgtcgttttggtattgagccgcgcgttgctctgttgtcgcactccaactttggttcttctgactgcccgtcgtcgagcaaaatgcgtcaggcgctggaactggtcagggatcgtgcgccagatctgatgattgatggtgaaatgcacggcgatgcagcgctggtggaagcgattcgcaacgaccgtatgccggacagccctttgaaaggttctgccaatattctggtgatgccgaacatggaagctgcccgcattagttacaacttactgcgcgtttccagctcggaaggtgtgactgtcggtccggtgctgatgggcgtggcgaaaccggttcacgtgttaacgccgatcgcatcggtgcgtcgtatcgtcaacatggtggcgctggccgtggttgaagcgcaaacccaaccgctgtaattcttttttaactctcacgcttaccctgaatattcagggtaagcggtttggctgcaatatattagtaaagcttattactgagtttgcgaataataaaaaaagcagtctatataatatctcgatattattttatttatattcatgcgttgcatatgaaagtttatgcaccacagcgaatatctctccattcttagtgatctacctcaccttttaaacgcgcttgccgaattttgttatttactctgacgaaaaattgtcacgatacacgaaagtttttcacaggcggcgactcatggataaagaacgcatcattcaggaatttgtgcccggcaaacaggtcacactggcgcatctcatcgcgcatcccggtgaggaactggcgaagaaaatcggcgttccggatgcgggcgcaattggcattatgacgctaactcccggcgaaacggcgatgatcgccggtgatttagcgctgaaagccgctgatgtgcatatcggttttctcgaccgattcagcggtgcattggtgatttatggctcggtgggcgccgtagaagaagcgttatcacaaaccgtcagcggtttaggtcgcttattaaattatacgctttgtgaaatgaccaaaagttaatacgaggcattcatgaaacgaattgcgtttgtgggtagcgtcggggcaggaaaaacaacgttatttaatgcgttgcaggggaattataccctcgccagaaaaacacaggccgtggaatttaatgataagggcgatattgatacgccgggtgaatattttaaccatccccgctggtatcacgccttaattaccacgctacaggatgtagacatgctgatctatgtccatggcgcaaatgacccggaaagtcggttgcctgccgggttgctggatattggcgtcagcaaacggcaaatcgccgtcatcagtaaaacggacatgccagatgctgacgtcgccgcaacgcgaaagttattgcttgagacgggtttcgaagagccgattttcgagctaaacagccacgacccgcaaagcgtgcagcaactggtggattatctggcatctctcaccaaacaggaggaagcaggtgaaaaaactcatcacagcgaatgatattcgtgaagcacacgcgcgcggcgaacaggcaatgtccgtggttctgcgcgccagcattattaccccggaagcccgtgaagtggcggatctactgggttttaccatcaccgaatgtgatgaatcgatcccggtaacggcgtccgtgcccgccagcgtgccagccgacaaaaccgaaagccagcgcatccgcgaaaccatcattgcccagctgccggaaggccagtttaccgaaagcctggtcgcacagctgatggaaaaagtgatgaaggaaaaacagtcgctggagcagggcgcaatgcagccgagcttcaaatcggtgaccggcaaaggcggcatcaaagtgattgatggcagtagcgtcaagtttggtcgtttcgacggcgcagagccgcattgcgtgggcttgactgatcttgtgaccggagacgacggcagcagcatggccgccggttttatgcagtgggagaacgcattcttcccgtggaccctgaactacgacgaaatcgacatggtgctggaaggagagctgcatgttcgccacgaaggccaaaccatgatcgccaaagcaggcgacgtgatgtttatcccgaaaggctccagcatcgaatttggtacgacatccagcgtgaaattcctgtatgtcgcctggccggctaactggcaatccctatgaaagatttcatcaccgaagcatggctaagagcgaaccatacgctcagcgaaggcgcagagatccatctccctgcggacagtcgcctgacgccctctgcccgggagttactggaaagccgccatctgcgcatcaagtttattgacgagcagggccgcctgtttgttgacgatgaacagcagcagccgcagcccgttcatgggctgaccagtagcgatgaacatccgcaggcgtgctgcgaactgtgccgccagccggtggcaaaaaagccagatactctgactcacctgtcggcggaaaaaatggtcgccaaaagcgatccgcgtctgggttttcgcgcggttctcgacagcaccattgcgctggcagtgtggctgcaaattgaactggcggagccgtggcagccgtggctggcggatatccgttcgcgtcttggcaacattatgcgtgccgatgcgctgggggaaccgctgggctgccaagcgattgtcgggctttctgacgaagatctgcatcggctttctcatcagccgctgcgctatctcgaccacgatcatctggtgccggaagccagccacgggcgcgatgctgcgttgctcaatctgctacgcaccaaagtgcgggaaaccgaaaccgtagcggcgcaggtctttatcacccgcagctttgaagtattacgcccggacatcttgcaggcgctgaaccgcctttcgagcacggtctacgtgatgatgatcctgagcgtaacgaagaagccgctaacggtgaagcagatccaacaacgactgggggaaacgcaatgattattgaacgttgtcgtgaactggcgttgcgagcgcccgccagagtggtttttccggatgcgttagatcaacgtgtgctgaaagctgcgcaatatttacatcaacaaggtctggcaacgcccattctggtcgccaatccgtttgaacttcgtcagtttgcgctcagtcacggcgtggcgatggacgggctacaggtgattgatccgcatggcaacctcgcaatgcgggaagaatttgctcatcgctggctggcccgcgcgggcgaaaaaacgccgccggatgcgctggaaaaacttaccgatccgctgatgttcgccgccgcaatggtcagcgccggtaaagcggatgtctgtatcgcgggcaacctctcttccacggcgaatgtgctgcgtgccggattacgcattatcggcttgcagccaggctgtaaaacgctctcttccattttcctgatgctgccacagtacagcggcccggcgttgggctttgccgattgcagcgtggtgccacagccgacggcggcgcaactggcggatatcgcgcttgccagtgccgaaacctggcgcgccatcaccggggaagagccgcgcgtggcgatgctgtcgttttccagcaatggtagcgcccgtcacccctgtgttgctaacgtccagcaggcgacagaaatcgtccgtgagcgcgcaccaaagctggtggtggatggcgagttacagtttgacgccgccttcgtgccggaagtggcggcgcaaaaagcgcctgccagcccgctacagggcaaggccaatgtgatggtttttccgtcgctggaagccggaaatattggttacaaaatcgcacaacgactcggcggatatcgtgccgtcgggccactgatacaaggacttgccgcgccgatgcacgatctctctcgtggttgtagcgtgcaggaaattatcgagctggcgctggtggcagctgtgccgcgtcagacagaagtgaaccgcgaaagcagtttacaaacactggttgaatgaacggtcccgttctggaccctgataaagaggaaagcacaatggaagcattaggaatgatcgaaacccggggcctggttgcactgattgaggcttctgacgcgatggtgaaagctgcgcgcgtcaagctggttggtgttaagcagattggcggcggcctgtgtactgccatggttcgtggtgatgttgcagcctgtaaagccgcgaccgatgcaggtgccgcagcggcacagcgtatcggcgagctggtatctgtacacgttatcccgcgtccgcacggcgacctggaagaagtcttcccgatcggcctgaaaggcgatagcagcaacctgtaatcaccctgtgtgacgtcgattcgggcgtcacgctctctcctttttcattttaccttctgcggagggtagggggagcttttacctgaaatacgccacggaggcgggtatgaaactggcagtcgtcactggacaaattgtttgtaccgtacgccatcacggactggcgcatgacaaattgctgatggtggaaatgattgatccacaaggtaatcctgacgggcaatgcgccgtcgccatcgacaatattggcgcgggaaccggggagtgggtgttactggtgagtggcagttccgcccgccaggcgcataaaagcgaaacgtcaccggtcgatctgtgcgtgattggcattgtcgatgaggtggtgtctggcggtcaggtaattttccacaaataaggcagaacatcatgaatcaacaggatattgaacaggtggtgaaagcggtactgctgaaaatgcaaagcagtgacacgccgtccgccgccgttcatgagatgggcgttttcgcgtccctggatgacgccgttgcggcagccaaagtcgcccagcaagggttaaaaagcgtggcaatgcgccagttagccattgctgccattcgtgaagcaggcgaaaaacacgccagagatttagcggaacttgccgtcagtgaaaccggcatggggcgcgttgaagataaatttgcaaaaaacgtcgctcaggcgcgcggcacaccaggcgttgagtgcctctctccgcaagtgctgactggcgacaacggcctgaccctaattgaaaacgcaccctggggcgtggtggcttcggtgacgccttccactaacccggcggcaaccgtaattaacaacgccatcagcctgattgccgcgggcaacagcgtcatttttgccccgcatccggcggcgaaaaaagtctcccagcgggcgattacgctgctcaaccaggcgattgttgccgcaggtgggccggaaaacttactggttactgtggcaaatccggatatcgaaaccgcgcaacgcttgttcaagtttccgggtatcggcctgctggtggtaaccggcggcgaagcggtagtagaagcggcgcgtaaacacaccaataaacgtctgattgccgcaggcgctggcaacccgccggtagtggtggatgaaaccgccgacctcgcccgtgccgctcagtccatcgtcaaaggcgcttctttcgataacaacatcatttgtgccgacgaaaaggtactgattgttgttgatagcgtagccgatgaactgatgcgtctgatggaaggccagcacgcggtgaaactgaccgcagaacaggcgcagcagctgcaaccggtgttgctgaaaaatatcgacgagcgcggaaaaggcaccgtcagccgtgactgggttggtcgcgacgcaggcaaaatcgcggcggcaatcggccttaaagttccgcaagaaacgcgcctgctgtttgtggaaaccaccgcagaacatccgtttgccgtgactgaactgatgatgccggtgttgcccgtcgtgcgcgtcgccaacgtggcggatgccattgcgctagcggtgaaactggaaggcggttgccaccacacggcggcaatgcactcgcgcaacatcgaaaacatgaaccagatggcgaatgctattgataccagcattttcgttaagaacggaccgtgcattgccgggctggggctgggcggggaaggctggaccaccatgaccatcaccacgccaaccggtgaaggggtaaccagcgcgcgtacgtttgtccgtctgcgtcgctgtgtattagtcgatgcgtttcgcattgtttaaggagtaacagatggcgcacgacgaacaatggctcaccccacgtctgcaaacggcggcaacgctgtgtaaccagacgcccgccgcgacggaatctccgctgtggctgggggtggatctgggcacctgcgatgtggtgtcgatggttgtcgaccgcgacggtcagccagtggcggtatgcctcgactgggccgatgtggttcgcgacggcatcgtctgggatttcttcggcgctgtcaccattgttcgtcgccatctcgacacgctcgagcagcaattcggtcgtcgttttagccatgcggcgacttcatttcctccaggtacggacccgcgtatttccatcaacgtgctggaatctgccggactggaagtgagccatgtgctggatgagccaaccgcagttgcggatctgctgcaactggacaacgccggtgtagtggatatcggcggcggcactaccggcattgccatcgtgaaaaagggcaaggtgacgtactcggcggatgaagccaccggcggacatcacatctctctgactctcgccggaaatcgccgtatttcgctggaagaggcggagcagtacaagcgcggtcacggtgaagagatttggcctgcggtgaaaccggtgtacgaaaaaatggcggacattgtcgcccggcatattgaagggcagggcattactgatttatggctggcgggcggctcctgtatgcaaccgggcgtggcagaactgtttcgcaaacaattcccggcgttacaggtgcatttaccgcagcacagtttgtttatgaccccgctggcgatcgccagtagtgggcgagagaaagcggaggggctatatgcaaaatgaattgcagaccgcgctctttcaggcgttcgataccctgaatctgcaacgggtaaaaacatttagcgttccaccggtgacgctttgcggtccgggcgcggtgagcagttgcgggcagcaagcgcaaacgcgtgggctgaaacatctgttcgtgatggcagacagctttttgcatcaggcggggatgaccgccgggctgacgcgtagcctggccgttaaaggcatcgccatgacgctctggccgtgtccggtgggcgaaccgtgcattactgacgtgtgtgcagccgtggcgcagttgcgtgaatcaggctgtgacggggtgattgcgtttggcggcggctcggtgctggatgcagcaaaagccgtggcgttgctggtgacgaaccccgatagcacgctggcggaaatgtcagaaaccagcgttctgcaaccgcgcctgccgttgattgccattccaacgaccgccggaaccggctctgaaaccaccaacgtaacggtgattatcgacgcggtgagcgggcgcaagcaggtgttagcccatgcctcgctgatgccggatgtggcgattctcgacgccgcattgaccgaaggtgtgccgtcgcatgtcacggcgatgaccggtattgacgcgttaacccatgccattgaagcgtacagcgcgctgaacgccacaccgtttactgacagtctggcgattggcgctattgcgatgattggcaaatcgctgccgaaagcggtgggctacggtcatgaccttgccgcgcgcgagagcatgttactggcttcatgtatggcgggaatggcgttttccagtgcggggcttgggttgtgccacgcgatggcgcatcagccaggggcggcgctgcatattccacacggtctggcgaacgccatgttgctgccaacggtgatggaatttaaccggatggtttgtcgcgaacggtttagtcagattggtcgggcactgcgaactaaaaaatccgacgatcgtgacgctattaacgcggtaagtgagctgattgcggaagttgggattggtaaacgactgggcgatgttggcgcgacatctgcgcattacggtgcatgggcgcaggccgcgcaggaagatatttgtctgcgcagcaacccgcgtaccgccagcctggaacagattgtcggactgtacgcggcggcgcaataaatgccggatgcgatgcttgccgcgtcttatccggcctacgggattgcacatgtagggcggataaggcgttcacgccgcatccgccagtggcgcggtgcaattgccggatgcgacgcttgccgcgtctgatccggccttcgggattgcacatgtagggcggataaaacgtttacgccgcatccgccaataaataacaactaacagggagtaaaggcgatgggaattaacgaaatcatcatgtacatcatgatgttctttatgctgatagctgccgtagacaggatcctgtcgcagttcggcggttctgctcgtttcctcggtaagttcggtaaaagtatcgaaggatcaggcggtcagttcgaagaaggctttatggcaatgggcgctctgggtctggcgatggtcggtatgaccgcgctggcaccggtactggctcacgtactcgggccggtaattatcccggtttacgaaatgctcggcgcaaacccgtcaatgttcgccggaacgctgctggcgtgcgatatgggcggcttcttcctcgccaaagagctggcgggcggcgacgtagcagcgtggctatactctgggttaattctcgggtcgatgatggggccaacgattgtgttttccattccggtggcgctcggcattatcgaaccttctgaccgtcgttatctggcgctcggcgtgctggcgggcattgtgaccattccgattggctgtattgctggtggtctggttgctatgtactccggtgtgcagatcaatggtcagccggtggaattcacctttgcgctgatcctgatgaacatgatcccggtacttatcgttgcggtgctggtggcgctggggctgaaattcatcccggaaaaaatgatcaacggcttccagatcttcgccaaattcctcgttgcattgatcaccctcggtcttgctgccgcggtagtgaaattcctccttggctgggaactgatccccggtctggaccctatctttatggctcctggcgataaacccggtgaagtgatgcgcgccattgaagttatcggttctatctcctgcgtgctgttaggggcgtatccaatggtgctgctgctgactcgctggtttgaaaaaccgctgatgagcgtcggtaaactactgaatatgaacaacattgcggcagccggcatggtggcaacgcttgccaacaacatcccgatgtttggcatgatgaagcagatggatacccgcggcaaagtcatcaactgcgccttcgccgtttccgctgctttcgccctgggtgaccacttaggcttcgccgctgccaacatgaacgccatgatcttcccgatgattgtcggcaagttgatcggcggcgtaacggcgattggcgtggcgatgatgctggtgccaaaagaagacgcgaccgcgactaaaaccgaagcggaggcacaatcgtgaacactcgccagctattgagcgtcggtatcgatatcggcaccaccaccacccaggtgattttctcccggctggagctggttaaccgtgcggcggtgtcgcaggtgccgcgctacgaattcattaaacgcgaaattagctggcaaagtccggtgttctttacccctgtcgataaacagggcggtttaaaagaagcggaactgaaaaccttaatactcgagcaatatcatgctgcgggtattgagccggaaagcgttgattctggtgccatcatcatcaccggtgaaagcgcgaaaacccgcaatgctcgcccggcggtgatggcgctctctcagtcgctgggcgattttgtcgttgccagcgccgggccgcacctcgaatccgtgatcgccggtcacggagccggggcacaaaccctttctgaacaacggctgtgtcgggtactgaatatcgacatcggcggtggcaccgcgaactacgccctgttcgatgccggaaaaatcagcggcactgcctgcctcaacgtcggtggtcgcctgctggaaaccgacagccacgggcgcgtggtttacgctcataaaccggggcagatgattgtggatgagtgcttcggtgcaggcaccgacgcccgttcgctgaccggcgcgcagctggtgcaggtgacccggcggatggcagaactgattgtcgaagtgattgacggaacgctctcaccgctcgcgcaggcattgatgcaaaccggtttgctgcccgcaggtgttacgcccgaaatcattacgctttctggcggcgtgggcgaatgttatcgccaccagcccgccgacccgttctgttttgccgatattggcccgctgctggcaactgcgctgcatgaccatccgcgcctgcgtgagatgaacgtacagtttccggcgcaaaccgtgcgcgccacggtgattggcgcgggcgcgcataccctttcgctctctggcagcacaatctggcttgagggcgtacaactgccgctgcgcaatttgccggtggcgatcccgattgatgaaacggatctggtgggggcctggcaacaggcgctgattcagctggatcttgatcccaaaactgacgcgtacgtgctggcgcttcccgcctcgctgcctgtgcgttacgccgcggtactgacggtcatcaacgcgttggtcgatttcgtcgcgcgttttccgaatccgcatcccctgctggtggtggccgggcaggactttggtaaagctctgggcatgttgttgcgcccacagctacaacaactcccgttggcagtcattgacgaagtgattgtccgcgcgggggactatatcgacattggtacgcctctttttggcggatcggttgtgccggtgacggtgaaatcactcgcatttccttcctgagggaacgacttatgaaactaaagaccacattgttcggcaatgtatatcagtttaaggatgtaaaagaggtgctggctaaagccaacgaactgcgttcgggggatgtgctggcgggcgtcgcagcggcaagctcacaggagcgcgtggcggcaaagcaggtgttgtcggaaatgaccgtagcggacatccgcaataatccggtgattgcctatgaagatgactgcgtgacgcggctgattcaggacgatgttaacgaaacggcctacaaccagattaaaaactggagcatcagcgaactgcgtgagtatgtgctgagcgatgaaaccagcgtggacgacattgcctttacccgcaaagggctgacctcggaagtggtcgcggcggtagcgaagatttgctccaacgcggacctgatctacggcgcgaagaaaatgccggtaatcaaaaaggccaataccaccatcggtattccgggcacctttagcgcccgtttgcagccaaatgacacccgtgacgacgtgcaaagtatcgccgcgcaaatctacgaagggctttccttcggggtgggcgatgcggtgatcggcgttaacccggtgactgacgacgtggaaaacttaagccgcgtgttggataccatctatggcgtgatcgacaaattcaacatcccaactcagggctgtgtactggcgcacgtcaccacccagatcgaagcgatccgtcgtggcgcaccgggcgggctgattttccagagtatctgtggcagcgaaaaagggctgaaagagtttggcgtggagctggcgatgctcgacgaagcgcgcgcagtgggcgcggagttcaaccgtatcgccggggaaaactgcctctacttcgaaaccggacaaggctctgcgctatccgctggcgctaacttcggcgcagaccaggtaacgatggaagcacgtaactacgggctggcgcgtcattacgatccgtttatcgtcaacaccgtggtcggctttattgggccggagtatctctacaacgaccgccagattatccgtgctggcttagaagatcactttatgggcaagctgagcggcatctctatgggctgtgactgctgttataccaaccacgctgacgctgaccagaacctcaacgaaaacctgatgatcctgctcgccaccgcaggctgcaactacatcatggggatgccgctgggtgatgacatcatgctcaactaccagaccaccgcattccacgataccgccactgtgcgtcagttactcaacctgcgcccgtcaccggagtttgaacgctggctggaaagcatgggcattatggcaaacggtcgcctgaccaaacgggcgggcgatccgtcactgttcttctgatgacgcggagataacacatcatggatcaaaaacagattgaagaaattgtacgcagcgtgatggcgtcaatgggacaaacggcccccgcgccgtcagaagcaaagtgcgccaccaccaactgtgcggcaccggtgacctcggaaagctgtgcgctggatttaggttccgctgaagcaaaagcgtggattggtgttgaaaacccgcatcgcgcagacgtattaacagaactgcgccgcagcaccgtggcccgcgtttgtaccggtcgtgccggtccgcgtccacgtacccaggcgctgctgcgtttcctggccgatcactctcgttcgaaagataccgtactgaaagaagtgccggaagagtgggtgaaagcgcagggcttgctggaagtacgctctgaaattagcgacaaaaatctctacctgactcgcccggatatgggccgccgcctgtgtgcagaagctgttgaagcgctgaaagcacagtgtgttgctaatccggacgtacaggtcgttatttctgatggcctgtcaactgatgccatcaccgtcaactacgaagagatcctgccgccgctgatggcgggcctgaaacaggccgggctgaaagtcggcacgccattctttgttcgttatggtcgcgtgaagattgaagatcagatcggtgagatcctcggcgcgaaagtggtgatcctgctggtgggggaacgtccggggttagggcagtcagaaagcctctcctgctacgccgtttactcgccgcgtatggcgaccaccgttgaggccgatcgcacctgtatctctaacattcaccagggcggcacgccgccggttgaagccgcagccgtcattgtggatttggcgaaacgtatgctggagcagaaagcatccggcatcaacatgacccgataaggaggcatcatgccagctttagatttgattcgaccgtcggtaaccgccatgcgggtgattgcctccgttaacgctgaatttgcgcgtgaactaaaattgccgccgcatattcgtagcctcgggctgatttctgccgattctgacgacgtcacctacattgcggctgacgaagcgaccaaacaagcgatggtcgaagtggtatatggtcgctcgctgtatgcgggagcggcacacggcccgtcaccgactgccggtgaagtgctgattatgcttggtgggccaaacccggcggaagtgcgtgcaggtctggatgcgatgattgcgcatattgaaaatggcgcagctttccagtgggctaatgacgcgcaagatacggcattcctggcacatgtagtttcgcgtaccggttcttatctctcatcaaccgccgggatcacgcttggcgatccgatggcgtatctggtggcaccgccgctggaagcgacctatggcattgatgcagccctgaagtctgccgacgtacagctggcgacctatgtcccgccaccgtctgaaaccaactactcggcagcatttttaaccggtagccaggcagcgtgtaaagcagcctgtaacgcctttaccgatgcagtgctggaaatcgcgcgtaatccaatccagcgtgcgtaacggaggttgccgatgatcaatgcactgggattgctggaagtggacggcatggtcgccgcgatagatgcagcggatgccatgctcaaagcagctaacgttcgtctgctcagtcacgaagtgcttgaccctggtcgcttaacgctggtggtggaaggcgatctggcggcgtgtcgtgcggcgctggacgcaggttgtgctgccgcgatgcgtaccgggcgtgtcatcagccgcaaggagatcggtcggccagacgatgacacccagtggctggttactggctttaaccgccagccgaagcaacccgtaagggaacccgacgcgccagttatcgtcgcggaatctgctgacgagttgttggcgctgttaacatcagtacgtcagggaatgacggcaggagaagtggctgcccactttggctggccgctggaaaaagccagaaatgcgctcgaacagctcttttctgccgggacgttacgtaaacgcagtagtcgttatcgtctcaagccccattaacctgtcggaggtgccgggtgtcctacaacacccggcattaacatcatgaaaaagacccgtacagccaatttgcaccatctttatcatgaacccttacccgaaaacctgaagctcacgccgaaggtcgaagtggataatgttcatcaacgacagacaacggatgtctatgaacatgctttaacgattaccgcctggcagcagatttacgatcagctgcatccgggcaagtttcatggtgaatttacggaaattctactcgatgatattcaggtttttcgtgaatacaccggtctggcgctgcgtcagtcgtgcctggtctggccgaactcgttctggtttggcattccggcgacgcgcggtgagcagggatttatcggttcgcaatgtctgggaagcgcggaaatcgccacccgccctggtggcactgaatttgaactgagcacgccggatgattacacgatcctgggcgtggtgctttctgaagatgtcatcacccggcaggctaactttttgcataacccggatcgggtattacatatgttgcgtaaccagtcggcgctggaagtgaaagagcagcataaagccgcgctgtggggctttgtccaacaggcgctggcgacgttttgcgagaatccggaaaatctccatcagcctgcagtgcgaaaagtgctgggggataatttgctaatggcgatgggggccatgctggaagaagcgcaaccaatggtgacggcggaaagcatcagtcatcagagttaccgtcgattgctttcccgcgcccgtgaatatgtgctggaaaacatgtccgaaccggtgacggtgctggatttgtgtaatcaactgcatgtcagccgccgcacgctacaaaacgcgtttcacgctattttaggcattggcccgaacgcgtggctgaaacgcattcgcctgaacgccgtacgccgcgaactgataagtccgtggtcgcaaagtatgacggtaaaagacgccgccatgcagtggggattctggcatctggggcaatttgccacggattaccagcagctgttttccgagaagccgtcactgacgctgcatcagcggatgcgggagtgggggtgagggagttacacccaatccctgaccttaataaactcacttaacgccgcttctgggctgccatcttttggctgataatcatattcccagcgtaccagtggcggcattgacatcaggatagactcggtgcgcccgccagtttgcaggccaaacagcgtgccgcgatcccagaccagattgaactcgacataacgaccgcgacgatataactggaaattgcgctcgcgctcgccgtaggccatcgctttccgtcgctcgacaattggtaaataagcgtcggtgtagcctttgcctaccgcctgcataaaggcaaaacagcggtcgaaatctggcgtgttcaggtcatcaaagaacagcccgccaataccgcgctgttcgttgcgatgtttgaggtagaagtattcgtcgcaccactttttgtaacggggataaacgtcttcgccaaatggcaggcacaggtcacgggcggtgcgatgccagtgaatagcatcttcttcaaaaccatagaatggggttaagtcgaagccaccgccaaaccaccagacgggatcggcacccggtttttcggcaataaaaaaccgcacattcgcgtggctggtgggaacatacgggttatgcggatgcactaccagtgaaacgcccatcgcctcgaaactgcgcccggcaagttccgggcgatgagcggtggcggaagcaggcatcgcctcaccgtggacatgcgaaaagttgacgcctgcctgttcgaaaacaccaccattacgcaacacccgactacgcccgccgccgccagcttcgcgctgccaactatcttcgacaaattctgcgccatcgacggcggtcagctgctgacaaatcgtatcctgaaggttgagcagaaactgtttaacctggtgtgcgtcgggtttcataacttatcgctttttcgaatgtgctttctggttgtcgaaccagtggaaataactgatcacgccttcagcaatcgctgtggcgattttctgacgaaacgccgccgtgcctaacagccgttcttcttccgggttggtgataaacgaggtttccaccagcaccgaaggaaccgacggtgatttcaacaccacaaatgccgcttgttcggtgttgcggctgtgcagtttatgcaccggcttaatcttcttcagaatatgcgagccaagcgtcagactatttttaatggtatctgtttgcaccagatcaaacagcacttgttgcaataggtgatccttgtcagtcgcctttttaccggcaacttcatcggcgcggttttcgcgttcagacaggtatttcgccattgcgctacttgccccacggttagagagggcaaataccgaagcaccggcagctttcgggttggtaaagccatcggcatgaattgacataaacagatctgcgccatgtttatgggcgatttcaacgcgatcgtaaagtgggataaacgtatcgccagaacgcgttaaacgcgcatcaatcccatgattacgcaaaatggaacggacgtttttagcaatcgccagcaccacatgtttttctttcgaaccgttgcgtccgatcgctccggtatcaattccgccgtgacctggatcgagaacaacgacacgtttgccgccagattttttggctttcggcttgctgtgtccgttgctggtttttaaaagttcgtctttggcgatggcttgcgacattcctgacaacgtcagggcagccaaaccggctttcagcacctggcggcgcgaagtgagtgtttttagtggtttaaaagtgctcatacggcctgagttgtaataataaagttccagatgttatatcgtatcgcgtaatccgttacgacggtttgctgttgagaattgttttacttttcatttcaatagttgacaactccccattatgccactttttcaaccgattttcgtcagatattggctaattcgaccgttcacgccataatcagccttttaacccgcaaaaaggtaacgaataccatggagatacgcgtatttcgccaggaagatttcgaagaggtcatcaccctttgggagcgttgcgacttgctgcgtccgtggaacgatccggaaatggacatcgagcgtaagatgaaccatgacgtcagtttgtttttggtcgctgaggtaaacggtgacgtggtcggaacggtgatgggcggttatgacgggcatcgcgggtctgcttattatcttggcgtgcatccagagtttcgtgggcgtgggattgccaatgcgttgcttaatcggctggagaaaaagctgattgctcgtggctgcccgaaaattcagatcaatgtgccggaagataacgacatggtgctcggaatgtatgaacgcctgggatatgaacacgccgacgtgctgagtctgggtaagcgtttgattgaagatgaagagtactgagtttcatcctgtccattatgatgcgcacggtcgcctgcgtttacccttgctcttctggcttgtgctattgcttcaggcgcgaacctgggtgctgtttgtcattgccggtgcgtcgcgcgagcagggtactgcgctgctaaatctgttttatcccgatcacgataatttctggctggggctgattcctggcattccggcggtgctggcgtttttgttgagcggtcggcgggctacgtttcctcgcacctggcgtgtactctattttctgttgctgttggcgcaggtggttttactttgctggcaaccgtggctgtggctgaacggtgaatccgttagcggtatcggtctggcgctggtagtggcggatattgtggcgttaatctggctgctgaccaatcgacgtttacgcgcttgttttaatgaagtaaaagaataacggcactttttggtgaatttgcactccaagcaacgttattgaataaccaaaggaagtgacatgaaatcgctgcgtttaatgttatgcgctatgccattgatgctgaccggctgttccacgatgtcgtcagttaactggtctgccgctaacccgtggaactggtttgggtcgtccaccaaagtgagcgagcagggcatgggtgaattaacggcgtccacaccactgcaagaacaagccattgccgatgcgcttgatggcgattatcgcctgcgcagcggaatgaaaaccgcgaacggcaacgtggtgcgcttttttgaagtgatgaagggcgacaacgtggcgatggtgattaacggcgatcaaggcacgatcagtcgcattgacgtgctggatagcgatattcctgctgacaccggtgttaaaatcggtacaccgtttagcgacctttacagcaaagcatttggcaattgccaaaaagctgatggtgatgataatcgtgccgtcgaatgtaaagccgaaggcagtcaacatattagctaccagttcagcggggaatggcgtggtcctgaagggttaatgccttcggacgataccctgaaaaactggaaagtcagtaaaattatctggcggcgttaatttgcgtctgaacaaaccgccgccgcgaaaaaacacgtaaaatagcgctcaacaatgccacggattgcgtggcattattattttcaggaggaacaatgtctcaggttcagagtggcattttgccagaacattgccgcgcggcgatttggatcgaagccaacgtgaaaggggaagttgacgccctgcgtgcggccagtaaaacatttgccgacaaactggcaacttttgaagcgaaattcccggacgcgcatcttggtgcggtggttgcctttggtaacaacacctggcgcgctctgagcggcggcgttggggcagaagagctgaaagattttccgggctacggtaaaggccttgcgccgacgacccagttcgatgtgttgatccacattctttctctgcgtcacgacgtaaacttctctgtcgcccaggcggcgatggaagcctttggtgactgcattgaagtgaaagaagagatccacggcttccgttgggttgaagagcgtgacctgagcggctttgttgacggtacggaaaacccggcgggtgaagagacgcgtcgcgaagtggcggttatcaaagacggcgtggatgcgggcggcagctatgtgtttgtccagcgttgggaacacaacctgaagcagctcaaccggatgagcgttcacgatcaggagatgatgatcgggcgcaccaaagaggccaacgaagagatcgacggcgacgaacgtccggaaacctctcacctcacccgcgttgatctgaaagaagatggcaaagggctgaagattgttcgccagagcctgccgtacggcactgccagtggcactcacggtctgtacttctgcgcctactgcgcgcgtctgcataacattgagcagcaactgctgagcatgtttggcgataccgatggtaagcgtgatgcgatgttgcgtttcaccaaaccggtaaccggcggctattatttcgcaccgtcgctggacaagttgatggcgctgtaagcgtttctgattcattgattaaaggccaggcagtaacattactgactggcctcagattgttgaccaagtgcgcgttgtacacgccggatgcggcgtgaacgccttatccggcctacgaaatcgtgctaattcaatatattgtgggctccacgtaggcctgataagcgtagcgcatcaggcagttttgcgtttgtcagcactctcagaccagccagtaacattactgactggcctttttattacttctgctttaacgccgcatacacctgatcaactacccaaccataagttgcaatcggcaactgaccgctttcgaacatattgggattcttttgcggatcggcaaccggcgaatgtggcttgttgcttaacatcacaatcgtcatatgattcaccggatcgataacggtcaccgttccggtccagccagtgtgaccgtaggtttgcgggcttgccagcgtgccaaacgtcggcgtcatggtggcattaccattcacgcgccagccgaggccaaaagtggcatcttccttagagctggtggtgaacatcttcaccgtttccgcattgaacagctgcacatcaccatagcccccgccgttcagcatcgtttgcattaacaccgcaatatcgccggtattggaaaacaaacctgcgtgcccggaaacgccgcccatcgaataaaaggctttttcatcgtgcacctgaccccagagagtggaggtgcggatattcgggaaatggatcacgccatcgcgggtattgccgttcaattccgtggcggcaatttgttgcggtttaaagcctttcagcagcgggttaaataccgtatgtgtcaggccgagcgggcgataaatcgactcttcaacatagcggtcaagcggctgaccggtaaccgactcgacgataaatccaagcagcatataatcgacatcgctgtagatatgtttgctgccgggctgatattccagcggcgtgcgcttgatcatctccagcgtctggcctttatcctgggaatataacgcgcccgcgaccgctttattcgggtattgcggatctgccgggaaaccgccgctgtgatgcagcaggtcagaaatccgcagggtgtttttgcctttaatggtgtcatttggactatcggcaaaccccggaatatatttcgcaatccgatcgtcaggatgcagtttgccttcgctcatcagcttttgcagggcgaagttcgtggcgtacattttggtgtttgaggccaggtcatacagcgtcccggtggtggctttgacaggctgttccatcaacacgctgccatcgtactttttcgccgctccccaggctttgcgatacacaatctgattatctttaatgatcagcaggtttacgctgggataaccgacatcaacttgctggctaatccagcgatccatctggttaagccgttcgacgttaaaccctgctttctctggcgagctttctgtcagaacagggtattttgcggcgctgacgctacaactaacagccagcagagaaagatagagcattgtccgtttcatgatatcagtccagattgacgttacggcagccaaagagcgtggtgaaaataaacccgcaaacccatgccaccagaatcccgccagcataaaccgccatggccggaaggatgccttgtgcggaagtcatcagcggcagcgctaccagaccagacggcccaaaggcgctgtttaagcccatcggcagaccccaccaggctatcaggccgataaacaaaccgcccgccgcgccgcctaaacaggcggtaacaaacggcttcatgcggggcagggtgacaccgtaaatcagcggttcaccaacgcccagcaggccgggaataatcgccccgcgtacctgactgcgtagcgcactgtgcggttgcgcccgccagtagagtgccagcgccgcgcccacctggcccgcgcctgccattgaaaggatgggaaataagctgttgaatccctggctgtccattaacgcgaggtaaacaggaataaagccctgatgcacgccaaataccacggcgatcaggaacagcccggctaaaaccgcacaaccgaacggattactgttcaggtgcataaacagccatgacataccttcgaataaccagccacccagcggcataatgatcaggtacgcaagcgtagcggtgatcagcagggtgattaacgaggtcagcagcatgtcgagatcgtccggcataaagcggcgcaccatgccttcaatgcgggcgcaggcccacgcggcaatcagcacgccgataatattgccgcgcggatcgatgggcagaccaaagaaatcgtgaaaaccggcgtagtaaccggtggtcgctgcggggttataaccgagcaaaaagagcgcggcgataattgcgccatttacgcccgtgccgccaaatgcctgggcggcgttatagcccaccagaatcaccaggaaagtgaacaaacctttgctgaacaccttcataaaattcagcgcatcgggtagtgttccctgagcatctgccggaacgtgcatcaccgtggcaattaacgtcgctatccccagcagcagaccggcggcaataaaaccggggatcagcggcgtgaagatggtggcgaatttggcgagaaattgttgcacgccggaggtttgtttggcttttaactgacgtttgttctgggcggcgatttctgcggcatcctgtaccggtgcttctcccagcagctcgctcatcgcttttgcggcacgatgcgctttaccaggcccaaaaacgacctgcacctggtcgctggtcaaaatgacgcccttcacgccttccagcgttttgatattgggatcaaccagtgaactgtcatgtacacccagacgcaggcgcgtcatacagttaccacaactggcgatatttcccggtccgccgacacgggtaagaatggtgttcagaagttcactgctgatctctttggccatgggttattccttgtctaaaacctgacgaataaagccgccgtgttgatccaggcgttttttagcttctgcggcatcgagatttttcagcaccatcacaatggccgttttacagttgcgctcgcaagcaattaacgccgcttccgcttgctctgcgctacatccggtggcgtttttaacaatattgacctgtcgcacatgcagtttttcgttggtggcgaccacatcgaccatcaggttgccgaacactttgccggatttaatcatcagcccggtggaaagcatattgagcaccagtttctgcgctgtacctgctttcatccgcgaagaaccggtaacaacttcggcacctacaatcggtgtaatggcaaactcagcggtggttgaaacggcgctccccggattacaggaaattcccactgtgcggcagccgagctggcgtgcgtattccagtccggcaatcacatacggcgtgcgaccgctggcagcaatgccaaccaccacatcctgtgccgttaaattaatatttttcagatcattaacaccgccttcccggctatcttccgcgccttccaccgcgtgctgaatggcatattcgccgccagcaatcaaaccaaccaccagacccggtttcacgccgtaggtgggcggacattcgctggcatccagaatccccagacgaccggatgttcccgcaccgaggtaaatcagacgcccgccgccgcttacctgggcgtggataacatcgatcgccgcggcgatatccggcagtacgcgctcaacggcaagcggtacggttttatcttcatcgttgataatccggcacatttccagcgtcgatacgcggtcaatttcagccgaggcggtgttcgagccttcagtaatcatcttttcaaattgcatcggtggtgaccttactatttacgatcaaataattgcagatgtatggaatcatatatcccgaattgacaggcttaaaggaatcattgagtctacactcgcagagtgtgaagagcgtcataagaacttaagcggaatttatgctgccagcccaggagagtggaagatgttgtacctgacgaaaataagcaatgcggggagtgaattcaccgaaaacgagcaaaaaatcgctgactttctgcaggccaacgtgagtgagctgcaatccgtttcttcacggcagatggcgaaacagctcggcattagccagtcgagcatagtgaaatttgcccaaaaactcggcgcgcaaggatttactgaattgcgtatggcgttaataggcgaatacagtgccagccgggagaaaacgaatgccacggcactgcacctgcacagttcgattaccagtgatgattcgctggaagtgatcgcgcgcaaactgaatcgcgaaaaagagctggcgctggagcaaacctgcgcgttgctcgattacgcgcggctgcaaaaaatcattgaggtcatcagtaaagcaccgtttatccagataacgggcctgggcggatcggcgctggtggggcgcgatctgtcgttcaaactgatgaaaattggctatcgcgtggcctgcgaagccgacacgcacgtacaagccaccgtttcccaggcgttgaaaaaaggcgatgtacaaatcgctatctcttacagcggcagtaaaaaagagattgtcttgtgcgcagaagcggcacgaaagcagggggcaacggtgattgccattacttctctgactgactctccgctgcggcggctggcgcatttcaccctcgataccgtttccggagaaaccgaatggcgtagctcgtcgatgtctacccgcacggcgcaaaattctgttaccgatttactgtttgttggccttgtgcaactcaatgatgtggagtcattgaaaatgattcagcgcagcagtgcgctaacacaacgcctgaaatgatgcataaagcagcgactggattgagattttcctgaattagtgagctgatccgcagcaatattttgtttatcctgtattttcagagggaatggagtgtaacgctctgtattaacaaggagagcattaaaatgggtaaactcacgggcaagacagcactgattacgggcgcattgcagggaattggcgaaggaattgccagaacttttgcacgtcatggcgcgaacctaatcttgctggatatctcccctgagatcgaaaagctggcggacgaactgtgtggtcgtggtcatcgctgtacggcggttgtcgccgatgtgcgtgacccggcgtcggtagccgcagctatcaaacgcgcgaaggaaaaagaagggcgcattgatatcctggtgaataacgcaggcgtttgtcgtctgggcagtttcctcgatatgagcgatgacgatcgcgatttccatattgacatcaatattaaaggcgtatggaacgtcacgaaggcggtgctgccggagatgattgcccgcaaagatggtcgcattgtgatgatgtcttcagtcactggtgatatggtggccgatcctggcgaaacggcgtacgccttaacgaaagcggcgattgttggcctgacaaaatcgctggcggtggagtacgcgcagtctggtattcgcgttaacgccatttgcccgggatacgtgcgcacaccaatggcggaaagcattgcccgccagtcgaacccggaagatccagagtcggtgctgactgaaatggcgaaagcaatcccgatgcgtcgcctcgccgatccgctggaagtcggcgaactggcggccttcctcgcatcggatgaatccagctatttaaccggtacacagaatgtgattgatggcggcagcacactgccggagacggttagcgtcggtatctgattcacctctgtttcctccctgcatttgtggggaggatttcgtcttgaactaagttcaccaggctattttatttgtcattttggccccgggcagtgctcgaaatcctcacgtactatgtgtacgctccggtttctccgcgctgttcgtgtccaaactgactgcaacaattacgcctgttgaaccaagttcttattcccttttcaacttccaaatcaccaaacggtatataaaaccgttactcctttcacgtccgttataaatatgatggctattagaaagtcattaaatttataagggtgcgcaatggccgttaacttactgaaaaagaactcactcgcgctggtcgcttctctgctgctggcgggccatgtacaggcaacggaactgctgaacagttcttatgacgtctcccgcgagctgtttgccgccctgaatccgccgtttgagcaacaatgggcaaaagataacggcggcgacaaactgacgataaaacaatctcatgccgggtcatcaaaacaggcgctggcgattttacagggcttaaaagccgacgttgtcacttataaccaggtgaccgacgtacaaatcctgcacgataaaggcaagctgatcccggccgactggcagtcgcgcctgccgaataatagctcgccgttctactccaccatgggcttcctggtgcgtaagggtaacccgaagaatatccacgattggaacgacctggtgcgctccgacgtgaagctgattttcccgaacccgaaaacgtcgggtaacgcgcgttatacctatctggcggcatggggcgcagcggataaagctgacggtggtgacaaaggcaaaaccgaacagtttatgacccagttcctgaaaaacgttgaagtgttcgatactggcggtcgtggcgcgaccaccacttttgccgagcgcggcctgggcgatgtgctgattagcttcgaatcggaagtgaacaacatccgtaaacagtatgaagcgcagggctttgaagtggtgattccgaaaaccaacattctggcggaattcccggtggcgtgggttgataaaaacgtgcaggccaacggtacggaaaaagccgccaaagcctatctgaactggctctatagcccgcaggcgcaaaccatcatcaccgactattactaccgcgtgaataacccggaggtgatggacaaactgaaagacaaattcccgcagaccgagctgttccgcgtggaagacaaatttggctcctggccggaagtgatgaaaacccacttcaccagcggcggtgagttagacaagctgttagcggcggggcgtaactgatgtttgctgtctcctccagacgcgtgctgccgggctttaccttaagcctcggcaccagtctgctgtttgtgtgcctgattttgctgctgccgctctccgcgctggtgatgcaactggcccagatgagctgggcgcagtactgggaggtgatcaccaacccgcaggtggtcgcggcctacaaagtaacgctgctgtcggcgtttgtggcatcgatttttaacggcgttttcggtctgctgatggcgtggatcctaacccgctatcgcttcccaggccgcacgctgcttgatgcgctgatggatttaccctttgcgctgccaacggctgtcgccggtttaacgctggcctcgctcttttccgtaaacggtttttacggtgaatggctggcgaagtttgatatcaaagtcacctatacatggctggggattgcggtggctatggcctttaccagcattccgtttgtggtgcgtaccgtgcagccggtgctggaagagttaggcccggaatatgaagaagcggcggaaacgcttggtgcaacgcgctggcagagtttctgcaaagtggtgctgccggagctttctccggcgctggtggcgggcgtggcgctgtcgtttacccgtagtcttggtgaatttggcgcggtgatttttatcgccggaaatatcgcgtggaagacggaagtgacgtcgctgatgatttttgtgcgcttacaggagtttgattacccggcagcgagcgcgattgcttcggtgatcctcgcggcatctctgctgctgctgttctcaattaacactctgcaaagtcgctttggtcggcgtgtggtaggtcattaatggcggaagttacccaattgaagcgttatgacgcgcgcccgattaactggggcaaatggtttctgattggcatcgggatgctggtttcggcgttcatcctgctggtgccgatgatttacatcttcgtgcaggcattcagcaaggggctgatgccggttttacagaatctggccgatccggacatgctgcacgccatctggctgacggtgatgatcgcgctgattgccgtaccggtaaacctggtgttcggcattctgctggcctggctggtgacgcgctttaacttccctggacgccagttactgctgacgctactggacattccgtttgccgtatcgccggtggttgccggtctggtgtatttgctgttctacggctctaacggcccgctcggcggttggctcgacgagcataacctgcaaattatgttctcctggccgggaatggtgctggtcaccatcttcgtgacgtgtccgtttgtggtgcgcgaactggtgccggtgatgttaagccagggcagccaggaagacgaagcggcgattttgcttggcgcgtccggctggcagatgttccgtcgcgtcacattaccgaacatccgctgggcgctgctttatggcgtggtgttgaccaacgcccgcgcaattggcgagtttggcgcggtgtcggtggtttccggctcgattcgcggcgaaaccctgtcgctgccgttacagattgaattgctggagcaggactacaacaccgtcggctcctttaccgctgcggcgctgttaacgctgatggcgattatcaccctgtttttaaaaagtatgttgcagtggcgcctggagaatcaggaaaaacgcgcacagcaggaggaacatcatgagcattgagattgccaatattaagaagtcgtttggtcgcacccaggtgctgaacgatatctcactggatattccttcaggtcagatggtcgcgttgctggggccgtccggttccgggaaaaccacgctgctgcgcattatcgccgggctggagcatcaaaccagcgggcatattcgcttccacggcaccgacgtgagccgcctgcacgcacgtgatcgtaaagtcggtttcgtgttccagcattacgcgctgttccgccatatgacggtgttcgacaatatcgcttttggcctgacggtgctgccgcgtcgcgagcgcccgaatgccgcagccatcaaagcgaaagtgacaaaattgctggaaatggtccagcttgcccatctggcggatcgttatccggcgcagctttccggcggccagaaacagcgcgtggcgctggcgcgcgcgctggctgtggaaccgcaaattctgctgcttgatgaaccgtttggcgcgctggatgcgcaggtgcgtaaagagctgcgtcgctggctgcgtcaactccatgaagaactaaaattcaccagcgtttttgtgacccacgatcaggaagaagcgaccgaagtagctgatcgtgtagttgtgatgagccagggcaatattgaacaggctgacgcgccggatcaggtatggcgcgaaccggcgacccgttttgtgctcgaatttatgggcgaagtgaaccgcctgcagggaaccattcgcggcgggcagttccatgttggcgcgcatcgctggccgctgggctacacacctgcgtatcaggggccggtggatctcttcctgcgcccttgggaagtggatatcagccgccgtaccagcctcgattcgccgctgccggtacaggtactggaagccagcccgaaaggtcactacacccaattagtggtgcagccgctggggtggtacaacgaaccgctgacggtcgtgatgcatggcgacgatgccccgcagcgtggcgagcgtttattcgttggtctgcaacatgcgcggctgtataacggcgacgagcgtatcgaaacccgcgatgaggaacttgctctcgcacaaagcgcctgataggttgagtgaatgttaaacgcccggaggcgcttcccgcgatccgggctttttaatggcaaggtttgtaacctgtagacctgataagacgcgcaagcgtcgcatcaggcaacaccacgtatggatagagatcgtgagtacattagaacaaacaataggcaatacgcctctggtgaagttgcagcgaatggggccggataacggcagtgaagtgtggttaaaactggaaggcaataacccggcaggttcggtgaaagatcgtgcggcactttcgatgatcgtcgaggcggaaaagcgcggggaaattaaaccgggtgatgtcttaatcgaagccaccagtggtaacaccggcattgcgctggcaatgattgccgcgctgaaaggctatcgcatgaaattgctgatgcccgacaacatgagccaggaacgccgtgcggcgatgcgtgcttatggtgcggaactgattcttgtcaccaaagagcagggcatggaaggtgcgcgcgatctggcgctggagatggcgaatcgtggcgaaggaaagctgctcgatcagttcaataatcccgataacccttatgcgcattacaccaccactgggccggaaatctggcagcaaaccggcgggcgcatcactcattttgtctccagcatggggacgaccggcactatcaccggcgtctcacgctttatgcgcgaacaatccaaaccggtgaccattgtcggcctgcaaccggaagagggcagcagcattcccggcattcgccgctggcctacggaatatctgccggggattttcaacgcttctctggtggatgaggtgctggatattcatcagcgcgatgcggaaaacaccatgcgcgaactggcggtgcgggaaggaatattctgtggcgtcagctccggcggcgcggttgccggagcactgcgggtggcaaaagctaaccctgacgcggtggtggtggcgatcatctgcgatcgtggcgatcgctacctttctaccggggtgtttggggaagagcattttagccagggggcggggatttaaggattaatagcatcggagactgatgacaaacgcaaaactgcctgatgcgctacgcttatcaggcctacaaggtttctgcaatatattgaattagcacgattttgtaggccggataaggcgtttacgccgcatccggcataaacaaagcgcacttttttaacagttgttgctgccgacaaatgcagtatttaattttcgtgaggaaacgccgtaaggtcatcaatcattttttgaagtattggtgagtcctgaccgtcaccccattgaagaatttttgcggtaagctgatgacgcgctagtgcattgagtcccatctttttaagtttatgggagattttacccatgactttaatctgaccgaatgcagttgcgtaggtaatcatattgctctggatagtgctcatttcatcgactagtaattgcgcacgaacatcctcttcaagaatactgtccatagcgatgtatttcataccccacatagtttcaattaacatttgagggaaatcagcacagtccagatccggctctttacggaggctattttcaagaacgtttagagcatcagcaccttcatcgctgccaaaaggagattcttcatcccagcaacacatataaagtggatcagtaaaatggcactggaagtttgggtgtgacgttttaacatgtaacccaatttcttcatcatcaaaatagtagcgatccatgaagttaaactttggatcttcttgatagcctttcttcatttttgcggcaatcaatttactggcttctttcagacactgttcttcattatcgaactcttttgtctggaatttaccaatactacctaccttgccatagttgacagctaaactatccccttcgtaatctatccaccaaaatttattcgatttttcatcgtgataaataaagcgttttttcatgttacctcctgtaaatgccttcccaaagcggattaatttccttccgcaggcaccgttttatccgtctgcgcaattaacgcatgtaaaaaaggctgtgcgttctcatcgctcttaccggggatcttcacaatatacggcttcccagtaatcgatgacgacgaagcaaccttatcaataaactgctcggcagtgtcaatgcggttacgggtattgccgagcttcagacgcagatgagaaaccgcttcatagcaggtatgttcatcaccgttgcgcacaaatatcaaatcctttttctgtgctaatccctccagcatggcgttgatgcgggcttcttcatgggcagttaacttcgcgtaaacggggagtgtcattagtagtgtaatgaccagacaaatgattttcttcattgaattaccttatccttgttttgtgatagccgatttgactgccagaatcaggtaaagtttcggttggattacgatgaggatcatcggcaaggagaaaaaattaaatgagtagtttgttgttgtttaacgataagagtagggcactgcaggcggatatcgtcgccgtgcagtcgcaggtggtttacggcagcgtgggcaacagcattgccgtgcctgctatcaaacagaacggcctgaatgtctttgccgtgccgacggtattgctgagcaatacgccgcattatgacactttctacggtggtgcgattccggacgaatggtttagcggctatttgcgtgcgcttcaggagcgtgatgcgctgcgccaacttcgtgctgtaaccacgggctatatgggaacggcatcgcaaatcaaaatccttgccgagtggctgactgcgctacgcaaagaccatcctgacctattgatcatggtcgatccggtgattggcgatattgatagcggaatttatgtcaaacctgaccttcccgaagcgtatcgacaatatttactgccgctggcgcagggaattacccccaatatctttgagttggaaatcctgaccggtaaaaattgccgcgatctcgacagtgccattgctgccgcaaaaagtctgctttcagacacattaaaatgggtggtggttaccagcgcctccggtaatgaagaaaatcaggagatgcaggttgtggtggtcactgccgacagcgtgaatgtcatttcccattcacgggtaaaaaccgacctgaaagggactggcgacctgttttgtgctcagctcatcagtggcttgctgaaagggaaggcgttaaccgatgcagtgcaccgagcggggttgcgcgtactggaagtgatgcgctacacccagcagcatgagagcgatgaattgattttgccgccgctggcggaagcataaaaaaatggcgccgatgggcgccatttttcactgcggcaagaattacttcttgatgcggataaccggggtttcacccacggttacgctaccggacagtttgatcagttctttgatttcgtccatgttggagataacaaccggagtcagggtagacttggctttctcttccagcagcggcagatcaaattcaatgacagtatcgccaactttcacgcgctgaccttcttcagcaatacgcttgaagccttcgcctttcagttcaacggtgtcgataccgaagtggacgaacagttcaacgccgctatcagattcgatagagaatgcgtggttggtttcaaagattttaccaatggtgccgtctactggcgcgaccattttgttacccgttggtttgatagcaataccatcaccaacgattttttccgcaaaaacgacatccggcacgtcttcgatattgacgatctcgccagagagcggagcaatgatctcaatagttccggtatccttcttgtcgtcggaaaccagagatttcagtttatcgaacaaacccatgatcttctcctaagcagtaaattgggccgcatctcgtggattagcagattgttttttcttcaatgaacttgttaaccagcgtcattaactcgtccgttgtcggttgagcaagagcctgctctgctaacaccttcgcatcttcgaagttcgtgttacggataatcttcttaatgcgcgggatagaaatggcgctcatagagaattcgtccagacccatccccagcaacagaagtgtagcacgttcatcgccagcaagctcaccacacatgccagtccatttgccttcagcatgagaagcatcaataacttgcttgatcaagttcagcacggacggtgacattggctggtaaaggtgtgaaatcatatcattaccacggtcaactgccagagtgtactgcgttaaatcattggtgccgatactaaagaaatcaacttctttggctaaatgacgtgcaattgttgcggcagccggtgtttccaccattacgccgatttcaattgactcgtcaaacgctttaccttcgtcgcgcagttcctgtttgtagatttcgatctctttgcgcagtgcacgcacttcttcaacagagatgatcatcgggaacataatgcgcaatttaccgaaagccgaggcacgcaggatagcgcggagctgatcgcgcaggatctctctacgatccatcgcgatacggatagcgcgccagccgaggaacgggttctcttctttcgggaagttcatgtatggcagctctttgtcgccgccgatgtccatggtacgaacgataaccgcttgcgagccacacgcttcagccactgctttgtaagcagcaaactgttcttcttcagtgggcagtgcgtcgcggtccatgaacaggaactcagtacgatacagaccaacgccttcagcgccgttacgctctgcaccttcaacgtcacgaaccgtaccaatgttagcgcatacttctacctggtgaccgtccagcgtaatagctggcagatctttcagtttagcaagctctgctttttcagaagccacttgctcctgaacagcgcgcattttatcaataacttcgttggttggattgacgtaaacctgattatttacggcatccagaatcagatagtcgtcatttttcacctgagaggtgacgctaccggtacccacgatagcaggtagttccagagaacgcgccatgatagaggtgtgggaagtacggccacccgcgtcggtgatgaaacccagcaccttcttcaggttcagctgtgcggtttcggacggcgtcaggtcagcggcaaccagaatgacttcatcctgaatggcgctcaggtcgataatcttcaggcccaggatgttgcgcagcaggcgcttaccgatatcacgtacgtcagccgcacgttctttcaggtattcatcatccagctcttccagggcagaagcctgaccttcgataacttcatgagcagctgcgtcagctgtcatgtgcttatctttaatcagggctatgatttcctgctccagctcctcatcttcgagcagcataatatgcccttcaaagatggcttctttttcttcaccgaacgtttcaccagctttcgttttgatcgtttccagctgggctgatgccttggcacgaccgctcagaaaacgttcaacttcctgatcaacctggtcggcagaaatttttttccggtcaatgacaatttcgtcttctttcagaagcagagctttaccgaaagcgatacccggggatgctaaaatgcctgaaatcataaccctaccttacttgtgactgatttttaaaagaacccgggaaattactcgagttccgccatcagtttaaccagatgttcaaccgctttctgctcgtcttcgccttctgcggagatagtcacaacggtaccttgagtcaggcccagagtctgcagtttaaacaggcttttcgcgctggcgcttttgccgttggaagtcacagtaatttcagaagtgaagcccttagcttcttttacaaactgggcagcagggcgggtgtgcagaccgttcggagcggtaatggtaacttcttgctggaacattgtatttccccaacttataggtttagtgttgtggaactaaagtctagcctggcggttcgactttagcctgtattgttagcgccagtttttaacagacgcgacgcacgaagagcgcaatacagtccattgctggcgggtgttgaccgctgacgtttcgtacgtcattaaacattatgccgctaaaggaagaattgaaccaaatcataaaatcgattcagctttggcttttcctgtaacgattaatttcgcgcatcaaaataattagtctggttaaataccagttccgacaggctgaatcaatgccaggaggggcgaaagtttgaagcaggccacaaaaaagcacctaaaaaggtgcttttttacgcatttttaacaagctggcattactgttgcaattctttctcagtgaagagatcggcaaacaatgcggtgcttaaataacgctcacccgatgatggtagaataaccacaatattcttgttggtaaagctttcatcttcttgtagtttcaacgccgcggcaacagctgctccagaagagatacctgcaagaataccttcttcttccatcagacgacgcgcggtagaaatcgcttcttcattggtgatgccaatgactttatcgaccagcttgagatcgaggttagccgggataaaaccagcgccaataccctgaattttatgcgggccaggtttaatctcttcacctgccagcgcctgggcgataactggagaatcggttggctcaacggcgacagagataagatcggtcttgcctttggtgcctttaatgtagcggctgacgccagtcagcgtaccgccagtcccaacgccagcaataaatacatcaacctgaccgtcggtatcttcccatatctccggaccggtggtcttttcgtgaatttcagggtttgccggattgctgaattgttgcagcagcaggtatttctctggattgctggcgacaatttcttctgctttttggattgcgcctttcatgcctttagcaccttccgtcagcaccaggtttgcacctaacgctttcagcagcttgcggcgttcaatactcatggtttctggcatggtcagggtgagtttgtaaccgcgagcggcagctacataggccagtgcaatcccggtattaccgctggtcggttcaaccagttcaacgcctggtttcagcacgccgcgcttttcggcatcccaaatcatgttggcaccgatacggcacttaacgctgaagctggggttacgagattccaccttcgccagaatgcgtccgttaccgatgcgattcaggcgaaccagcggcgtgtgaccgatagtcagcgagttatcttcaaaaatcttactcatggcctgtccttaactgtatgaaattgggatacaacaggtagcatacccgctcagagaatatgcggaagtaaggatttagcatatctatatacagaagggaaataatgacatgcaagatggaataaggggcggcataagccacccctgtttcacacaaacggtttacaaaataaccggtagattgttaccgccacatcgcgtgtttatcgcgatagcaatcgacccacatcgccgtcgcgccacaaacggcaacgggcatgatgaacagattaagcagcgggatcatcgtaaacaggctggttaaagcaccaaactgcatattggtgattttgcgtgtgcgcagggcggtgcgcatctctttaaacggcactttgtggttatcgaaggggtaatcgcaatactggatggctaacatccaggcgctaaacaggaaccacagtaccggcgcgacggtttgcccaataccagggatgaagtaaagaattagtaatacaattgcgcgcggcagataccaggcaaatttttgccattcgcgtttcatgattcgcggcacatctttcatgataccgaaaatcccggtatctggcggtgtagcgccagtcaatcgtgcttccagttgttcagccaataaaccgttaaacggagcggcaatccagttagcaatcgtggagaagaaatagccaaacactaacagcacagagatgacagccagaggccacaacagataactcagccattgtagccagtccggaacgtaactcatgagagtcgggatccagacatcgagctgtgtaaagagccaccagaatgcgccccccatcaacaaaatattgaccagcagcggtaaaataacgaaacgccgaatcccaggttgcgagacgagcttccagccttgcgcaaaatagtaaaaaccgctgcgtggggcagatgtgaatgatgaaaccataatcaggatgagctccttttgaccaatcccaggaaaattctgcgtattttaccgggtaattgcgcaatggacagttaggatatgttcgaaaaaacagcaaaaagcacgatttcatctatctttgtgctgtgaaagttaatagtgcacttgcacttgaggtaatcggcaaatactcttagtgagtaaatgtttgccgtggtggcaaggtgttagaacaacagagaatataatgatgcaggatttgcgtctgatattaatcattgttggcgcgatcgccataatcgctttactggtacatggtttctggaccagccgtaaagaacgatcttctatgttccgcgatcggccattaaaacgaatgaagtcaaaacgtgacgacgattcttatgacgaggatgtcgaagatgatgagggcgttggtgaggttcgtgttcaccgcgtgaatcatgccccggctaacgctcaggagcatgaggctgctcgtccgtcgccgcaacaccagtaccaaccgccttatgcgtctgcgcagccgcgtcaaccggtccagcagccgcctgaagcgcaggtaccgccgcaacatgctccgcatccagcgcagccggtgcagcagcctgcctatcagccgcagcctgaacagccgttgcagcagccagtttcgccacaggtcgcgccagcgccgcagcctgtgcattcagcaccgcaaccggcacaacaggctttccagcctgcagaacccgtagcggcaccacagcctgagcctgtagcggaacctgctccagttatggataaaccgaagcgcaaagaagcggtgattatcatgaacgtcgcggcgcatcacggtagcgagctaaacggtgaactgcttcttaacagcattcaacaagcgggcttcatttttggcgatatgaatatttaccatcgtcatcttagcccggatggcagcggcccggcgttattcagcctggcgaatatggtgaaaccgggaacctttgatcctgaaatgaaggatttcactactccgggtgtcactatctttatgcaggtaccgtcttacggtgacgagctgcagaacttcaagctgatgctgcaatctgcgcagcatattgccgatgaagtgggcggtgtcgtgcttgacgatcagcgccgtatgatgactccgcagaaattgcgcgagtaccaggacatcatccgcgaagtcaaagacgccaacgcctgatacacttaaggcaaattaactcctcttcgaacccccgcttgtcgggggtttttagcattgatggtgcgatatggaatcaatcgaacaacaactgacagaactgcgaacgacgcttcgccatcatgaatatctttatcatgtgatggatgcgccggaaattcccgacgctgaatacgacaggctgatgcgcgaactgcgcgagctggaaaccaaacatccagaactgattacgcctgattcgcctactcaacgtgtaggcgctgcgccgctggcggctttcagccagatacgccatgaagtaccaatgctgtcactggataacgtttttgatgaagaaagctttcttgctttcaacaaacgtgtgcaggaccgtctgaaaaacaacgagaaagtcacctggtgctgtgagctgaagctggatggtcttgccgtcagtattctgtatgaaaatggcgttttagtcagtgccgcgacccgtggcgatggcaccaccggggaagatatcacgtctaatgtgcgtactattcgcgccattccgctgaagctgcacggagagaatatcccggcgcgtctggaagtgcgtggtgaagtgttcctgccgcaggcggggttcgaaaagattaacgaagatgcgcgacgcacgggcgggaaagtgtttgctaacccacgtaatgcggcagctggttcactgcgtcagcttgatccgcgtattacagcgaagcgaccgctcacttttttctgctatggcgttggtgttctggaaggtggcgagctgccggatactcatcttggccgtttactgcaatttaaaaagtgggggttgccggtcagcgatcgggtaacgctttgtgaatcggcggaagaagtgctggcgttctatcacaaagtggaagaagaccgcccgacgctgggctttgatatcgacggcgtggtgattaaggtcaactcactggcacagcaggagcagcttggctttgtcgcgcgtgccccgcgctgggcggtagcgtttaaattcccggcgcaggagcagatgacctttgtgcgtgacgtcgagtttcaggttgggcgtactggcgcgattacgcctgttgcgcgtctggaacctgtccatgttgcaggcgtgctggtgagtaacgcaaccttacacaatgcggatgaaatcgaacgtcttggtttacgcattggcgataaagtggtgattcgccgcgctggcgacgtgatcccgcaggtggttaacgtcgtgctttctgaacgcccggaagatacccgtgaggttgtattcccgacgcattgtccggtatgtggttctgacgttgagcgtgtggaaggtgaagcggttgcccgctgtaccggtggcctgatttgcggtgcgcagcgtaaagagtcgctgaaacactttgtttcccgccgtgcgatggatgttgacggaatgggcgacaaaatcatcgatcagctggttgaaaaagaatatgtccatactccggcagatctgttcaaactcaccgcaggcaaactgaccggactggagcgtatggggccaaaatcggcacaaaacgtggttaacgcgctggaaaaagcgaaagaaaccacctttgctcgcttcctctatgcacttggcatccgtgaagtcggcgaggccaccgcagcatgtctggcggcatatttcggcacgctggaagcgctggaagccgcttcgattgaagagctgcaaaaggtgcctgatgttggcattgtcgttgcatcccacgttcacaacttctttgccgaagaaagcaaccgcaatgtcatcagcgagctgttggcggaaggtgttcactggcctgcgccgatcgttatcaacgcggaagagattgacagcccgtttgctggtaaaaccgtggtgcttacgggcagcttaagccagatgtcgcgtgatgacgctaaagctcgactggtcgaactgggcgcgaaagtcgcgggcagcgtgtcgaagaaaaccgatctggtgatagcgggtgaagctgcaggatctaaactggcgaaggcgcaggaactgggcattgaagtcatcgacgaagcggaaatgctgcgtttgctgggtagctgagatggaaaaagagcagctgattgaaatagccaatacgataatgccgtttggcaaatacaaagggcgtcgcttaatcgacctgccggaggagtatctgctgtggtttgcccgcaaagatgagttcccggcagggaagctcggtgagctaatgcaaatcacgctgctgattaaaaccgaggggctgacgcaactggtccagcccctgaagcgtccgctttaagctttatcggcgctgctttcctgctgcgcctgtaactgttcggtctggcgtttgtatcgacgcgccagcaccgcacagaccatcaattggatctgatggaaaatcatcaggggcagcaccatcataccgatcaccgatgtggggaacagaatgtttgccatcgggatgccatttgccagactctttttcgaaccacaaaagacgatagtaatttcatctgccttattgaagctcagtcggcgtgccataaagacgttaactacaatcacgatagccagaagaacgcagctgaccaccacgataaacagcaatgatccccagccaactttatgccagataccattaacgacggcttcgctgaacgctgtataaaccaccaacagaatggacgtctggtcagttttcgcaatccattttttattgcgcgacacccagtcaccaatccacggccgggaaagatgccccaacacaaacggcagcagcagttgcagcataattttaccgacctgctcaaggctgccccctgcaccgtgaacattcatcaccagaccaaccagcaatggtgaaaggaaaatccccagcaggctggatgccgacgcagaacaaaccgctgccgcgacgttaccgcccgccattgacgtgaaggctattgcagactgcacggtagccgggagaatgcacaagtagagaaaaccggagtagagcatcgggtcgacatttaccggtttccaccaggcaaacagtacacccagaatcggaaacagcacgaaggtgctgcacattacccacaaatgcagtcgccagtgaccaccgccagcaataatcgcctcacgcgacaacttcgcgccgtgcataaagaacagcagggcaatagctgcggtggtcagattttcaaagaaggggacgaaatcgcctctggccggaaagaaagaggccagcaacaccaccgtgatcagggttaaggtggaaggatcgaggatacgaaaaagtttcataaagactccagatgatcgatggttctattgtgcttcttccagtttgagaaataaaattgatttattgcatccattcatgaagaaaacagatgaattattctttaaaacaattaaaggttttcgtcacagtagcgcaggagaaaagttttagtcgtgcaggagagcgtatcggcctgagccagtcggcagtgagtcacagtgtgaaggaactggaaaatcatactggtgttcgcctgctggacagaaccacgcgtgaagtggtgcttacagatgcagggcagcagctggctttgcgtcttgagcgactgctggatgaactgaacagcacgttgcgcgataccgggcgtatggggcaacaactgagcggaaaagttcgggtcgctgccagccagaccatttccgcgcatcttattccgcaatgcattgctgaaagccatcgccgctatccagatattcagtttgtcctgcacgatcgtccgcagcagtgggtaatggaaagtattcgccagggagatgtcgattttggcatcgtcatcgatccaggcccagtgggcgatctgcaatgtgaagcgattctttccgagcctttctttctgctttgccatcgcgatagcgctttggccgtggaagattatgtaccctggcaggcattacagggagcgaaattggtgttgcaggattacgcgtcaggcagccgaccgctgattgacgcagcgctggcgcgcaatggtattcaggcgaatattgtgcaggagattggacatccggcgacgctgttcccgatggtagccgcaggcatcggcatcagtattcttcccgcactggcgctaccattgcctgaaggtagcccactggtggtaaagcgcattacgccggttgttgaacgccagttgatgctggtgcgcaggaagaaccgttcactttccaccgccgctgaagctttatgggacgtggtacgagaccagggcaatgcgctaatggctgggcgggaaggggatccgttgtatcagatatagagtgaattcatactgccgggagccccggcagtaatcaatcagaagttaaatttgatggagtagatgatcgcatcctggtaaaaatcttcgcccagtttgtcatccgcatatcgatactgaatccccgtagtaatgtgtgatgttgcattccaccacagtgcaactgcgccattcagcccttctttaccgccattacccgctgcataggtagcgtcacggtcaaactcgtactcgttccagttggtaagagtgaatttctcgctgcccagcataaagttgtaacctgcaacccagccggcgacatagccgttgtcgccagtgtaataggtttgatctgtataacgcttagcaaagaacggtttgaaccaccaaccgctgccggtgaaattgtagccgataccgtacaggaacatatcgtcgtggaaattcacgcgattcgcagaaccgtaggtgccatacgcatgcaagtagagattaaatccggtgtcacccaggtaaatacggttggtatttttaaaggtataacgctgctcgctacctggtttattatggcgaccgttatagaagttttcccagtcgaagaacccgtacatttctccccaactaaagttagcgccaccttcaaattcaagataaccaaaatcatctttgtgtgatttggtcgacgatttttcggtagtccggctggtccagtccagataatgcacgccgatatctgcaaaaccgcctttaaattctgcatgagatacaacaggtatcgctaatatagaggaaagtgtcagagttaaaagatgttttttcatagcataattccctatgccgatcgttattagtagattgcttaataaagtggtttgctaaaaacgacatattgttaatgcaaaggaattaatatcgccaatacagtttttaccgtggattaatagagaaaagatataaatccatcgatatcgaatcgctattgaatgcgtgagaaaagtgtattggtaagagccgggacaacctcgctataaaaaggcgttagattccaccctacagaaaaaggatatgtatgtctcaggttcaattttctcataacccgctgttttgcatagatattatcaagacttataaacctgatttcacgccacgagtggcctttattttaggttccgggctcggcgcgctggccgatcagattgagaacgctgtcgcaatttcctacgaaaagctgccgggcttcccggtaagtacggtacatggtcatgcgggggagttagtgctgggccatctccagggcgtaccggtggtatgtatgaaaggtcgcggacatttctacgaaggtcgtggaatgaccattatgactgacgcaattcgtacctttaagctgctgggctgcgagctactgttctgcaccaatgcggcaggctcgctgcgtccggaagtgggggcaggcagcctggtcgcattgaaagatcatatcaacaccatgcccggtacgccgatggtgggtcttaacgatgatcgttttggagagcgcttcttctcactggcaaatgcctacgatgcggaataccgcgcactgttacaaaaagtggcgaaagaagagggtttccctctgacggagggcgtgttcgtctcgtatccggggccgaatttcgagactgcggcggaaattcgcatgatgcaaattattggtggggatgttgttggtatgtctgtggtgcctgaggttatttcagctcgccattgcgaccttaaagtcgttgcggtctctgcgattaccaatatggcggaaggtttaagcgatgtgaaattgtcacatgcgcaaacgctggcggctgcggagctctctaagcagaacttcatcaaccttatttgtggctttctgcgcaaaattgcctgagaaaaacaataagaaacggcctcgcgggtgaggccaaatgatgcgacaaggaaacgattatgagcatcgcgatgcgcttaaaggtaatgtcctttttgcaatattttatctgggggagctggctggttaccctcggctcttacatgattaatactcttcatttcaccggcgctaatgttggcatggtttacagttccaaagggatcgccgcgattattatgcctggtataatggggatcatcgcagacaaatggctgcgcgcagaacgtgcatacatgctgtgtcacctggtgtgtgcgggcgtacttttttatgcggcatccgtaactgatccggatatgatgttttgggtgatgttagtcaatgcgatggcgtttatgccgactattgcgttatcgaacagcgtctcttattcctgtcttgcccaggcagggcttgacccggtgaccgctttcccgcccattcgcgtttttggtacggtggggttcattgtcgcgatgtgggcagtaagcctgctgcatctggaattgagtagtctgcagctgtatatcgcgtccggtgcgtcattgctgctgtcggcttatgcgctgactttgccgaagattccggttgcggagaaaaaagcgaccacatcgcttgccagcaagctgggtctggatgccttcgtgctgtttaaaaatccacgcatggccatctttttcctctttgccatgatgctgggtgcggtactgcaaattaccaacgtttttggtaatccgttcctacatgatttcgcccgtaacccggagtttgctgacagttttgtggtgaaatatccctccattttactgtcagtttcacagatggcagaagtgggctttatactgactatcccattctttttaaagcgatttggcattaaaaccgtcatgctgatgagtatggtggcctggacgctgcgctttggcttcttcgcctatggcgatccgtcaacaaccggatttattttgctgctgctgtcgatgattgtttatggctgtgcattcgatttcttcaatatttctggttcggtatttgtcgaacaggaagttgattccagcattcgtgccagcgcgcaggggctctttatgaccatggtaaatggtgtcggcgcatgggttggctcgattctgagtggcatggcagtagattacttttcggtggatggcgtaaaagactggcaaactatctggctggtgtttgcaggatatgctctttttctcgcagtgatatttttctttgggtttaaatataatcatgaccctgaaaagataaagcatcgagcggtgactcattaaaaggattcgcggctctgctcttcagagctgcttttatgataaaggttaattagtgaaagatattttattttcttccggcgttggttttggtattggtgctttgtttacaatcgtgcgcttgcctattcctgtaccaaatgtattaccgggtatattatccattgtgtttatgtatgtcggatatctggtggtgaaatactttatgccatgataatttaatacgatgtatttattatatggagcacttaattatggaacgcgtatacagaacagatcttaagttgctccgttattttcttgccgtagcggaagagttgcattttggccgcgcagcagcgcgtttaaatatgtctcagcctccgctcagcattcatattaaagagctggaaaatcaactcggcacgcagctttttattcgccattcgcgcagcgtcgtactgacacacgcgggcaaaatcttgatggaagaatcgcgtcgattgctggtgaatgctaataatgtattggctcggattgaacaaataggtcggggagaagcagggcggattgaactcggcgtagtgggaacggcaatgtggggacggatgcgcccggttatgcggcgattcctcagggaaaatcctaacgttgacgttctttttcgcgaaaagatgcccgcgatgcaaatggccttgctggaacgccgcgaacttgatgccgggatctggcgaatggcgacagaaccaccgactggttttaccagcttacggttgcatgaatcggcgtttctggtggcgatgcctgaagagcatcatctctcatcattttccaccgtcccgctggaagcgctacgtgacgagtattttgttacaatgccgcccgtttacactgactgggattttttgcagcgagtttgccagcaggtgggattttcaccggttgttattcgcgaagttaatgaaccgcaaacggtactcgctatggtcagtatgggcattggtatcacattgatagcggacagctacgcacaaatgaactggccaggtgtcattttccgtccgctcaaacagcgcatccctgcagatttatatattgtttatgaaacacagcaggtgacgcccgcgatggttaagctgttggctgcattgacacagtaggtgaggagacaggaattgccggaaatagtagtctgctaagtgaagcgcatcaggcaatttcgcaaatcgcagatagcaaaaaagcgcctttagggcgcttttttacattggtgggtcgtgcaggatgactcgcttcgctcgcccttcgggccgtcgccgcgagcggctccgttgtttcgctgcgctcaactcaaacctgctgtaggttcgaatctttgagtatcgcagatagtaaaaaagcgcctttagggcgcttttttacattggtgggtcgtgcaggattcgaacctgcgaccaattgattaaaagtcaactgctctaccaactgagctaacgacccgagtggtgggtgatgacgggatcgaaccgccgaccccctccttgtaagggaggtgaggagtccggcctgtattacaaccgccaccgctattatgacccgctgcaggggcgatatatcactcaggatccgattgggctgaaggggggatggaatttttatcagtatccgttgaatccagttacgaatacagatcctctggggttagaagtttttcctagaccattccccttgccaattccatggcccaaaagccctgcacagcagcaagcagatgataatgctgcaaaagcattgacaaaatggtggaacgatacagcatcacaaagaatatttgactctctaatattgaataatccgggactagcattagatataacaatgatagcttctcgtggaaatgttgcagacacagggataactgatcgtgtcaatgacataataaatgacagattctggagtgatgggaaaaaacccgacagatgtgacgtacttcaggaactaattgattgtggtgatattagtgctaaagatgcaaaaagcacacagaaagcctggaattgtcgtcactccagacagtcaaacgataaaaaaagatagcccttgtggaggttcctgcaatgtcaaatacataccagaaaagaaaggcaagtaaagagtatggtttatataatcaatgtaagaaactaaatgatgatgaattatttcgcttacttgatgatcacaattccttgaaaaggatttcatctgccagagtattacagttaagaggtgggcaagacgctgttagattggcaattgagttctgctctgataaaaattatatccgtagagatatcggagcatttatactcgggcaaataaaaatttgcaaaaaatgcgaagataatgtttttaatattttgaacaatatggcattgaatgataagagcgcttgcgttcgagctacggcaatcgagtcaacggctcagcgatgcaagaaaaacccaatttattcacctaaaatagtagaacaatctcaaattactgcttttgataaatcgactaatgtcagacgtgctacagcatttgctatttctgttatcaatgataaagcaacaattccactattgattaatctgttaaaagatccaaatggagatgtcagaaactgggccgcatttgcaataaatatcaataaatatgataatagtgatattagggattgttttgtggagatgcttcaggataaaaatgaggaagtccgtattgaagcaataatcggactttcctacagaaaagataaaagggttttatctgttttatgcgatgagttaaaaaaaaatactgtttatgatgatatcattgaagctgcgggtgaattaggtgataaaacgctacttcctgttttagatactatgttgtacaagtttgatgacaatgaaattataacttccgctattgataagctgaagcgttcatagcgtgagttgcctatgcacagtgggggattcccgccggcacggtgcagatgctcgaccggctggaaagtgaaatcctggctgaccgggtgagtgaggaaagccgccgctggctggcatcgtgcggcctgaccgtggagcagatgaaaaaccagatggacccggtgtacacgccggcgcgaaaaatccacctgtaccactgcgaccatcgcggcctgccgctggcgctcatcagcacggaaggggcaacagcgtggtgcgcagaatatgatgaatggggcaacctgctgagtgatgagaacccgcatcatctgcagcagctcattcgcctgccgggtcagcagtatgatgaggagtccggcctgtattacaaccgccaccgctattatgacccgctgcaggggcggtatatcactcaggatccgattgggctgaaggggggatggaatttttatcagtatccgttgaatccggtcataaatgtagatccgcaaggtttggttgatataaatttataccccgaaagtgatcttatccattctgtagctgatgagattaatatcccaggcgttttcacaatcggggggcatggtacccccacatctattgaatccgcaacgcgcagtatcatgacagctaaagatctagcatatctaattaaatttgatgggaattataaagatgggatgacagtttggttattttcttgtaatacaggtaaaggacaaaattcatttgctagccaattagctaaagagttacatacaaatgtaataggacctgacacgctatggacgtggtgggggcgaggaactaatggtaagttaaaaatggatacagtgctaacagcaccaacgaaccttaattcaaataaggatctaatggctataacaacaaaagaccttggtaattggataacatatgggccatctgggcaccccatttctaatatgcaaggtacgccagaaaaacccagtgatataagataggttgtagatgtatgaaagcatgcttgttactatttttttatttttctcttattggtcaattgcatggtgctgatgtgaaaataaaagaaaacgaaagtgtgatgggatctacagcaatgacctatgatttaagtgaagaaaagctgatgaaactgaagtataaatcacaacatggtgattcagaggcatcatttcgactatatcaatattactgctttactaaaaataatattgataaacaattgcgattcttggaaagatcagcatctcaggggaatgttacagcgcagtttaattatggggtctttttatcagatacaaatccaacattatcagaatattataatttgaatagagctatttattggatggaattcgctgtaaataacggtaatattgatgcaaagagcaaacttcaagagctcaaaaagctaaagcgaatggatagaaggaagaataaggagaatccgtaaaagcaatagttcatcagactgccgcagcagtagtatgatgatgaatcagggctgtactataactattatcggtaacattaaccgcagcaggggcggtataacactcaggctccgattgggctggaaggtaggtggaatttttatcagtatccgttgaacccgatttctggaatcgatccccttgggattagccacctgtttatacagcataactttaggtatgctttcgtgtgtttcagatataccatgtgatgataatttttatgatgtgcttagtattccagtcgcttctggtaataatatgcaatgtaaaaataatccccgttgtacacatttataaatagatggccaatacctcaaggcctatggagttggaatgttaatgacccgggagcaagcaatagaaaacctgacggcatacgattagtaccgtcagttaatacaggaacttataatcgcaatggattttcaatacatagttgtttaaacgcttttggtccgtctttaggacctcgattctgttccgagggttgtataactggtttatctaatgacatgcaaaaattaaatgagttaatattttcagagccagatagcacattaacagttacggactaaaaaatatggcaaggttattaacaattgtatttttttctctatttctgcgagtgcagttactgcaagacaatttcagagagagttagatttggcagacaaagcaatattatgggcactaatatcagccagtactaaagagggacgaaaagcgtgttcactaagctattttgcctgtaaggccgcagaggctgaactcggactggcatatatggctgcgaatgataacaaggaatttctcacatccttatctaatataatgaggtacaaaatagatgctggactttccgaatcctatacatgctatttattaagtaagggaaagatcataagaccatatctgaaaaatctaaatccactccaacttgccgctgattgcattgaaacagtaaataaaataaaagataagaataaaaaaatcattgatataaattcagttaatatttgtagtgatgataaaaatataaaactgagagttaatagtactattatggccattgatgattctataaagtgcatcgatgaatgataacttaattttatttaaaaatatattaataactcactctccaggagtttttttaacttagttttataatgaatacgataattaaaagtgaagaaaaaaatagttgtatacatatattccatgaccctacattgtgatctatagattaaatattttttaaatgtgactgtcatccttcagataataaagccatcatcgcaatagatggaaaagcactcctgctcttttttgattagagccgtcgcaggaggaacaactcatatcatcattgcgatctcgacgatgtatagtctcatcctgcggcagaacaagacggataaaaaatccaatgagagcacactcatccagaacttattaacataatgaatattaaagaaaaatcatcgcagctaatgaagtaatatgcaaaaataattagtccttacaaggagcaaagttccataatctcccccctccccctcaatgatccaaataaagataatgcatccagctggtcattcttagcagcactttccgcatcaccgaaacatggctgaaatggtcggagtaaaccgccacctgggcgtagatgccgtcgggtaaggcatcgatatcatcgttagggtccagttcaatggttcccagcacaccgtccgtgccgggcacgaccgttaatgattgcaataccccctgcgcctgataagaaccgcctggcacgacaggtaaaatactggtcagtttgccgtggaacacctgcccaggtagcgcgttaaacaccacttctgcatcatcaccaggtttcagacgtaacagcgagttttgccgaaattgggcgacaatttgccgtttttgctcggggatgaaaaccatcaccggacgcaacggcaaggcagctgcgtatgtgcctgggcggatcagtacctgagtgacgtagccattgcttggtgcgcgaatgacagtctgctcaagattatattttgcttcagtaagttgcgctcttaagctcacaatctgcgattgctcgccgttaaccatactgtcgagctggctctggatctgcgcctgctccgccaccgagcctttcaccagcgcatcctgcgcgaggaaattttgccgcgcatcgtcgatgtcacgttccgagaacggattcaccgccgcctggctgcctttcagataacgttgataatttttaaacagacggtcgcgctccgctgaaacctgggtggtgttggcctgcgcttctgtgagctgcgcgcgcagagtctttatattatgcgtcgccgtcatcaggtcagcctgaagcctgtcaactcgcgcctggtaacgaaccgggtcgagcttaaaaagcacctcgcccttttgaataagctgattattcttgtcagtgacttcagtaacaattcccgtcacctgtggcgtgatggggatcgctatcactgccttttgcgcggtaaaagtgtaagggtggttgtagttcatcaacaaaatcaaaccactcaccagaaacacgccacccagcgccgccgtcgccagcgtccactgattcaccggaatacgaaagattttaaagaccgcccacgccagcgccacgtaagttaaaacaatcaatagatccataattagatctccgggaacgtggaatagtcagtctttttctcggcggcgagttgatgctccagccgggaaattcggtcagaaagtgcggcgatttccgggtcagtcgctttctcctgcgacgcaacatgtgactgcataccccagccacgctccggttgatagagcgtcgcccagatccacagaaacggccagataacatgcagagtaaacaggctcacccagcccgccgtatgaatagcgtcggcatggggatggttgcgctttttggcaatcagataagggatgtcatgtatcgcgatgattccataaaaaatcaccagaaagacgaagatcagcactcccaacgcgaaatagtttagaaacatatctgcctcggattcacgtttatcagtgttgtttttgggctggcagccagaagggagtcaggctgatattttgacaataatccgggttcgcgattctcgccataacaccaaagaataatttttagaggtgatgagttgcttagttacataacgattgtatgacgaaggcataacatgctgtagatcacatcaggtgaacgccgtaagaaaatatgttgtgattcagatcacaaagattcaacaaaccatcaaaacaaaaatgtgacactactcacatttaaatgccatttttagcgaaaatcgccgccttgttgcttttttacacaagcgttttgtgatgaatgtcacgtcaattacctctctaccccctatatttatgtgattgatatcacacaaaaggccgtcgactggacagttaaccgattcagtgccagatttcgcagtatctacaaggtccggctacctctgccgccacattaacaaaaaacctcgggcttccagcctgcgcgacagcaaacataagaaggggtgtttttatgtcatccgatattaagatcaaagtgcaaagctttggtcgtttcctcagcaacatggtgatgccaaatatcggcgcgtttatcgcgtggggtatcatcaccgcgttatttattccaacagggtggttaccgaacgagacgctggcgaagctggtcgggccgatgatcacttatctcctgccgctgctgatcggttataccggtggtaagctggtaggcggcgaacgtggcggcgtagtcggtgccatcaccaccatgggcgttatcgtcggcgcagacatgccgatgttcctcggttctatgattgcaggtccgctgggcggctggtgcattaagcacttcgaccgctgggtagacggtaagatcaaatccggttttgagatgctggtgaataacttctccgcaggcatcatcgggatgatcctcgctattctggcattcctcggcattggcccgattgttgaagccctgtccaaaatgctggctgcgggcgttaacttcatggttgtccatgacatgctgccgctggcgtctatctttgttgaaccggcgaaaatcctgttcctcaacaacgccattaaccacggtatcttctcgccgctgggtattcagcagtcccatgaactgggtaaatcaatcttcttcctgattgaagctaacccaggtccaggtatgggcgtgctgctggcgtacatgttctttggtcgtggtagcgctaaacagtctgcgggcggtgcggcaatcatccacttcctgggtggtatccacgaaatctacttcccgtatgtgctgatgaatccgcgtctgatcctcgcagtcatcctcggcggtatgactggcgtgttcacgctgactatcctgggcggtggtctggtttctccggcatctccgggttctatccttgctgtactggcgatgacaccaaaaggtgcttacttcgctaacatcgcgggtgtgtgtgcggcgatggctgtctccttcgttgtctctgctattttgctgaaaaccagcaaagtgaaagaagaagatgatattgaagcagcaactcgtcgtatgcaggacatgaaagctgagtctaaaggcgcatctccgctgtctgctggcgatgtgactaacgacctgagccacgtacgtaaaatcatcgttgcctgtgacgccggtatgggttccagtgcgatgggcgcaggcgttctgcgtaagaaaattcaggatgcaggtctgtcgcagatttctgttactaacagcgcgatcaacaacctgccgccagatgtggacctcgtcatcactcaccgtgacctgaccgaacgcgctatgcgccaggttccgcaggcacagcatatttcgctgaccaacttcctcgacagcggcctgtacaccagcctgaccgaacgtctggttgctgcccaacgccacacggcaaacgaagagaaagtaaaagacagcctgaaagacagctttgacgattccagtgctaacctgttcaagctaggcgcggagaacatcttcctcggtcgcaaagcggcaaccaaagaagaagcgattcgttttgctggcgagcagctggtgaaaggcggttacgttgagccggaatacgttcaggcgatgctggatcgtgaaaaactgaccccgacttatctgggtgagtctatcgcggtgccacacggtacggttgaagcgaaagatcgcgtactgaaaacgggcgtcgtgttctgccagtacccggaaggcgtgcgcttcggtgaagaagaagatgacattgcccgtctggtgattggtattgctgcccgtaacaacgagcacattcaggttatcaccagcctgaccaatgcactggatgatgagtccgtcatcgagcgtctggcacacaccaccagcgtggatgaagtgctggaactgctggcaggtcgtaagtaatccaatcccaccctctccacatggagaaggtggggttaattgcctgatgcgctacgcttatcaggcctacaggatgcatcacaatttgttgaatttgcacgttcttgtaggccagataaggcgcttacgccgcatccggcgctgcccctctcctcacggagagggtttgggtgagggaaaagcctcaccccagccctctcgggtaaaaacattgatgaaggttaatactatgaaagcattacattttggcgcaggtaatatcggtcgtggctttatcggtaaactgctggcagacgcgggtatccaactgacgtttgccgatgtcaatcaggtggtacttgatgccctgaatgcccgtcatagctatcaggtacatgtggttggtgaaaccgagcaggtagataccgtttccggcgtcaatgctgtcagcagcattggtgatgatgtcgttgatctgattgctcaggttgatttagtcactaccgccgttggcccggttgtgctggaacgtattgctccggcaatcgccaaagggctggtgaaacgtaaagaacaaggtaatgaatccccgctgaacatcatcgcctgtgaaaacatggtacgcggtaccacgcagctgaaaggccatgtgatgaacgccctgccggaagacgccaaagcgtgggtagaagaacacgttggctttgtcgattccgccgttgaccgcatcgtaccgccttcggcttcggcaactaacgatccgctggaagtgacggtagaaactttcagcgaatggattgtcgataaaacgcagttcaaaggcgcactgccgaacatcccaggcatggagttaaccgacaacctgatggcatttgtcgaacgtaaactcttcaccctgaacacgggtcatgctataaccgcgtacctcggaaaactggccggtcatcagaccattcgtgacgcgattctcgacgagaaaatccgcgcggtggtaaaaggtgcgatggaagaaagtggtgcagtattgatcaagcgctacggctttgacgctgacaagcatgcggcgtacatccagaaaatcctcggtcgttttgagaacccgtatctgaaagatgatgtagagcgcgtaggccgtcagccgctgcgtaaactgagtgctggcgaccgtctgatcaagccactgctcggtacgctggaatatggtctgccacataaaaacctgattgaaggtattgccgctgcaatgcacttccgcagtgaagatgatccgcaggctcaggaactggcagcactgatcgctgacaaaggtccgcaggcggcgctggcacagatttccggtcttgatgccaacagcgaggttgtatccgaggcggtaaccgcttataaagcaatgcaataatggtggaccaggcgcaggacaccctgcgcccgaataacagattgtcagatatgcaggcaacaatggaacaaacccaggcctttgaaaaccgtgtgcttgagcgtctgaatgctggcaaaaccgtgcgaagctttctgatcaccgccgtcgagctcctgaccgaggcggtaaatcttctggtgcttcaggtattccgcaaagacgattacgcggtgaagtatgctgtagaaccgttactcgacggcgatggtccgctgggcgatctttctgtgcgtttaaaactcatttacgggttgggcgtcattaaccgccaggaatacgaagatgcggaactgctgatggcattgcgtgaagagctaaatcacgacggcaacgagtacgcctttaccgacgacgaaatccttggaccctttggtgaactgcactgcgtggcggcgttaccaccgccgccacagtttgaaccagcagactccagtttgtatgcaatgcaaattcagcgctatcaacaggctgtgcgatcaacaatggtcctttcactgactgagctgatttccaaaatcagcttaaaaaaagcctttcaaaagtaagcaacgtctgcttactgcccctctacctgcttcggccgataaagccgacgataatactccagacgttgtagatataacggcacgctttcatcgggtattccggacggaatcgcgttacggggaggaagttttttcagatactcccggaacgcctggcttgatgccatgaaatctacggctttatcgataagaagcggaacgttttcacctaatttgcccatgatgatatctccgtattaccccgcgccgggaatgcgcggccgccaattttagtttaggttcccggtaaagatgacattaaggaaaacgtgctgaatcctcaataatcatccgctgctgtttattatcttttttctatagatttcttaattaatcaacgaattgcgtagtttttgagcatgttaatgattacgttgcagaactattacaatgtcatcagttgtgaacaaagcacttggtcgcgcatactaggggctataaatttatctttatcagaagccatcacatgaaagaagccgaaaaaaacgaaatcaaacgtctcagcgatcgcctggacgccatccgccaccagcaggccgatctgtcgctggttgaagccgcagacaaatatgccgagctggaaaaagagaaagccacgctggaagcagaaattgctcgcctgcgtgaggttcatagccaaaaactgagtaaagaagcacaaaaactgatgaagatgccgtttcagcgcgcaattaccaaaaaagagcaggctgatatgggcaagctgaagaaaagtgttcgcggactggtggttgtgcacccaatgaccgcactgggccgtgaaatgggcctggaagagatgaccgggttttcaaagaccgcgttttaagcccctcagacgactggtacgatcgtatcaacccgcatctgacttgcgttagctggtcaatgcggggactctcctgtctactcgcctaatgaccaaacaattcactccccttacgtcgatttaccgctggttgatattatgaaaatgcatctttaccgaaataaccacctataaacaataaaaatatatagaagatatcatttattaattaacaagcagttacgtctctttttttcggatttaattgtgaaattttaatcatcatattcatacaatcaattatctgtaaaatttttcccatacatggtttctttcatatttgacatttattaataatcatcattagaatccacgaaaaatattatattcatacaaacacagacatcttttgaaactaatgatacatttttatgatgaatgcttaaaacaatatttaatcgacacacatcactgtcattaatgtaaagcaacatagatcaccaataatacaatggacaactctaccggcattgatcgctggtcggaggcaataaggattttcacatgaacttgaagaagatttttttcagtgctgtcactgtttcagttctctgcgcattaacgggatgtgactacattcaagaaggcaagccagaaagtagtttactgaaacaagaagaagaacataacaataaaattgtgctacttgaaaaacaacaagcacagctaaagagtcaactcgaaactattcaaaaacaacaaactggcataataaacagcacaaagactttaactcacgtaattaaatccgttaaagaccaacaaaatacttttatttttaccgagtttaacccagcaaaaacgaagtatttcatcctgaacaacggttcggtggctttagcgggccgagtgttatccattgacgccacagagaatggcagtgttattcatatttcactggtcaacttattaagtataccaatctcaaacattggctttaatgcgacatggggtggtgaaaaacctgtcgatgccaaagagtttgcccggtggcaacaattacttttcaacacatcaatgacatccacattgaaattattaccaggtcaatggcaagacattaatttgacactgaagggtgtatcgccaaataacctgggatatctgaagttagccatcaatatggaaaatattcagtttgacaatcttcccgctgctgataatcggcagaaaagaagcaaaaaataaatgcaattagtacgcttataacaaggaatagcgagcatcattaatgaacaaaatatttaaagttatctggaaccctgccacagggaattatactgttaccagcgaaacggcaaaaagccgtggcaagaaatctgggcgcagtaagctgttaatttctgcgctggttgcgggtgggttgttgtcgtcgtttggggcattggcgaatgccgggaatgacaacggtcagggtgttgattacggtagtggatcagctggcgacggctgggttgctataggcaaaggggcgaaagcaaatacttttatgaacaccagtggttccagtactgctgtgggttatgacgctatagctgaaggccaatatagctctgccatcgggtcaaaaacccatgcgattggcggtgcatcaatggcctttggggttagtgcaatatcagaaggcgatagaagtatagcactgggtgcctcttcgtattcattgggccaatactcaatggccctcggccgttattcaaaagcattgggtaaattgtctattgctatgggggactcttccaaagcggaaggagcaaacgccattgccctgggaaatgccactaaagctactgagattatgagtattgctcttggcgacaccgccaatgcgtcaaaagcgtattcaatggcgctgggagcaagtagcgtcgcatctgaagaaaacgcaattgccctggggcgtagcagtgtagctagcggtactgacagcctcgcatttggcagacaatcacttgccagcgcagcgaacgctattgcgataggtgctgagaccgaagccgctgaaaatgcaactgctattggcaataatgcgaaggcaaaagggactaatagcatggcaatggggttcggaagccttgccgataaagtcaatactatcgcattaggaaatggcagccaggctctggcagataatgcaatcgccataggccagggcaacaaagctgatggcgtggatgccatcgctctgggtaatggtagccagtcgagaggcttaaacaccattgccttaggcacagccagtaatgcaactggtgataagagtcttgcgcttggtagtaatagcagtgccaacggtattaactctgtcgcgctgggcgcagattccattgcggatttagacaataccgtctctgtcggcaatagttcattaaaacgcaagatcgttaatgtgaaaaatggcgcgatcaagtctgacagttacgatgccattaatggttcacagctttatgccattagcgactcggtagcaaaaaggcttggaggaggggctgcagtagatgttgatgacggtactgttacagcaccaacctacaatttaaaaaatggtagcaaaaataacgtaggggctgcgctcgctgtacttgatgaaaacaccctgcaatgggaccaaaccaaaggcaaatacagcgctgctcatggtactagtagcccaactgccagcgtaatcaccgatgttgcggatggcacgatttcagcctccagtaaggatgcggttaacggttcccaactgaaagctaccaatgacgatgtcgaagccaacaccgccaatatcgctactaataccagcaacattgccacgaatacagcaagtattgccaccaataccaccaatatcaccaacctgacggattccgttggtgaccttcaggctgatgccctgctctggaacgaaactaaaaaggcattcagtgcagctcacggccaggataccaccagcaaaatcaccaacgttaaagatgccgacctgacggctgacagcactgatgctgttaacggctctcagctgaaaaccaccaacgatgctgtggcgacgaataccaccaatatcgccaataacacttccaatattgccactaacaccaccaacatctctaacctgactgagacggtgactaatcttggtgaggatgcgctgaaatgggataaggacaatggtgtattcacggcagctcatggcaccgagaccaccagcaaaatcaccaacgttaaagatggcgacctgacgactggcagcaccgatgccgttaacggctctcagctgaaaaccaccaacgatgccgtggcgacgaataccaccaatatcgccactaacaccaccaacatctctaatctgactgagacggtgactaatcttggtgaggatgcgctgaaatgggataaggacaatggtgtcttcactgcagctcatggcaacaataccgccagcaaaatcaccaatatcctggacggcacagtcactgcaaccagttccgatgccattaacggtagccagctttatgacttaagcagcaatatcgccacctacttcggcggcaatgcttctgtgaatactgacggtgtgtttaccggtccaacctacaaaatcggtgaaacaaattattataacgtcggcgatgcactggctgcgattaactcctcatttagcacgtctctcggcgatgctctgctttgggatgccaccgcaggtaaattcagtgccaaacacggtactaatggtgacgcaagcgtgatcactgatgtcgcagatggtgaaatttcagactccagttctgacgcagtaaacggctcacaactccacggcgtgagcagttatgttgttgatgcgctggggggtggtgccgaagtcaatgcagacggcaccatcactgcgccgacgtacaccattgctaatgctgattacgataatgtcggtgatgccctgaatgctatcgataccactcttgacgacgctctgctctgggatgcggacgccggtgaaaatggtgcatttagcgccgctcacggaaaagataaaactgccagtgtaatcactaacgtcgctaacggtgcaatctctgctgccagcagcgacgcgattaacggctcacaactctataccaccaataagtacatcgctgatgcgctgggtggtgacgcagaagtcaacgccgacggcaccatcaccgcaccgacttacaccattgcgaacgccgagtacaacaacgtcggtgacgccctggatgcgcttgatgataacgccctgctgtgggatgagactgccaatggcggtgctggagcctacaatgccagccatgacggtaaagccagcatcatcactaatgtcgctaatggcagtattagtgaggacagtaccgatgcagtgaacggttctcagttgaatgcgacgaatatgatgattgagcagaacacccaaattatcaatcagctcgctggtaacaccgacgcaacctatatccaagaaaacggtgcgggtattaactatgtgcgtactaacgacgacggcttagcgttcaacgacgccagcgcacagggtgttggcgctacagctataggttataactctgtcgccaaaggcgatagcagcgtagctattggtcagggcagctacagcgacgttgatacgggtatcgccctgggtagcagctctgtttccagccgagtgattgccaaaggctcccgtgacaccagcataacggaaaatggcgttgttattggttacgacaccacggatggcgaactgctcggtgcattgtctatcggtgatgacggtaaatatcgtcaaatcatcaacgtagccgatggttccgaagcccatgacgccgttacggttcgtcaattgcagaatgcgattggtgctgtagcaacgacaccgtccaaatacttccatgctaattcaacggaagaagattcactggctgtcggtgaagactcgctggcaatgggtgcgaaaaccattgttaatggtgatgcagggatcggtattggcctgaacactctggtgttaactgatgcaatcaacggtattgctatcggtagcaacgcgagtgcaaatcatgcaaacagtattgcgatgggtagtggttcccagaccacccgtggtgcgcagacggactacaccgcctacaacatggacgcgccgcagaattctgtcggtgaattctctgtcggcagcgaagacggtcaacgtcagatcaccaacgtcgcggctggttcagcggataccgatgcggttaacgtaggtcagttgaaagtcactgatgagcgcgtagcgcaaaatacccaaagcattactaacctgaacaatcaggtcactaatctggatactcgcgttactaatatcgaaaacggtattggcgacattgtaaccaccggtagcaccaagtacttcaagaccaacaccgatggcgtagatgccaacgcccagggtaaagatagcgttgctattggttctgggtccattgctgccgctgacaacagcgtcgcactgggtaccggttccgttgcagacgaagaaaatacaatctctgtaggttcttctactaaccaacgccgtattactaacgttgccgcaggtaaaaatgctaccgatgctgttaacgttgcgcagttgaagtcttctgaggcgggcggcgtgcgttacgacaccaaagctgatggttctatcgactatagcaatatcaccctcggtggcggcaacggtggtacgactcgtatcagcaacgtctccgctggcgtcaacaacaacgacgcggtgaactacgcgcagttgaagcaaagcgtgcaggaaacgaagcaatacaccgatcagcggatggttgagatggataacaaactgtctaaaaccgaaagcaagttgagtggtggtatcgcttctgcaatggcaatgaccggtctgccgcaggcttacactccaggtgccagcatggcctctattggtggcggtacttacaacggtgaatcggctgttgctttaggtgtgtcgatggtgagcgccaatggtcgttgggtctacaaattacaaggtagtaccaatagccagggtgaatactccgccgcactcggtgccggtattcagtggtaatgatccattaacttcatgtgactaagggcaaacgccaaattgcctgatgcgctacgcttatcaggcctacagggtgattctgcacattcctataggccgagtaaggtgttcacgccgcatctggcaagataaggcgctccgggtcaacaatctaagggcaattctctgatgaggattgcccttttctttaccagacatctccccccacaagaattggccctaccaattcttcgcttatctgacctctggttcacaatttcccaattaaaactcacatcaatgttgccaatacataacatttagttaaccattcattgtcattatccctacacaacacaattggcagtgccacttttacacaacgtgtgacaaagagatgagcaacagactcattacacgatgtgcgtggactccaggagacctgcaatgaatctctggcaacaaaactacgatcccgccgggaatatctggctttccagtctgatagcatcgcttcccatcctgtttttcttctttgcgctgattaagctcaaactgaaaggatacgtcgccgcctcgtggacggtggcaatcgcccttgccgtggctttgctgttctataaaatgccggtcgctaacgcgctggcctcggtggtttatggtttcttctacgggttgtggcccatcgcgtggatcattattgcagcggtgttcgtctataagatctcggtgaaaaccgggcagtttgacatcattcgctcgtctattctttcgataacccctgaccagcgtctgcaaatgctgatcgtcggtttctgtttcggcgcgttccttgaaggagccgcaggctttggcgcaccggtagcaattaccgccgcattgctggtcggcctgggttttaaaccgctgtacgccgccgggctgtgcctgattgttaacaccgcgccagtggcatttggtgcgatgggcattccaatcctggttgccggacaggtaacaggtatcgacagctttgagattggtcagatggtggggcggcagctaccgtttatgaccattatcgtgctgttctggatcatggcgattatggacggctggcgcggtatcaaagagacgtggcctgcggtcgtggttgcgggcggctcgtttgccatcgctcagtaccttagctctaacttcattgggccggagctgccggacattatctcttcgctggtatcactgctctgcctgacgctgttcctcaaacgctggcagccagtgcgtgtattccgttttggtgatttgggggcgtcacaggttgatatgacgctggcccacaccggttacactgcgggtcaggtgttacgtgcctggacaccgttcctgttcctgacagctaccgtaacactgtggagtatcccgccgtttaaagccctgttcgcatcgggtggcgcgctgtatgagtgggtgatcaatattccggtgccgtacctcgataaactggttgcccgtatgccgccagtggtcagcgaggctacagcctatgccgccgtgtttaagtttgactggttctctgccaccggcaccgccattctgtttgctgcactgctctcgattgtctggctgaagatgaaaccgtctgacgctatcagcaccttcggcagcacgctgaaagaactggctctgcccatctactccatcggtatggtgctggcattcgcctttatttcgaactattccggactgtcatcaacactggcgctggcactggcgcacaccggtcatgcattcaccttcttctcgccgttcctcggctggctgggggtattcctgaccgggtcggatacctcatctaacgccctgttcgccgcgctgcaagccaccgcagcacaacaaattggcgtctctgatctgttgctggttgccgccaataccaccggtggcgtcaccggtaagatgatctccccgcaatctatcgctatcgcctgtgcggcggtaggcctggtgggcaaagagtctgatttgttccgctttactgtcaaacacagcctgatcttcacctgtatagtgggcgtgatcaccacgcttcaggcttatgtcttaacgtggatgattccttaatgattgttttacccagacgcctgtcagacgaggttgccgatcgtgtgcgggcgctgattgatgaaaaaaacctggaagcgggcatgaagttgcccgctgagcgccaactggcgatgcaactcggcgtatcacgtaattcactgcgcgaggcgctggcaaaactggtgagtgaaggcgtgctgctcagtcgacgcggcggcgggacgtttattcgctggcgtcatgacacatggtcggagcaaaacatcgtccagccgctaaaaacactgatggccgatgatccggattacagtttcgatattctggaagcccgctacgccattgaagccagcaccgcatggcatgcggcaatgcgcgccacacctggcgacaaagaaaagattcagctttgctttgaagcaacgctaagtgaagacccggatatcgcctcacaagcggacgttcgttttcatctggcgattgccgaagcctcacataacatcgtgctgctgcaaaccatgcgcggtttcttcgatgtcctgcaatcctcagtgaagcatagccgtcagcggatgtatctggtgccaccggttttttcacaactgaccgaacaacatcaggctgtcattgacgccatttttgccggtgatgctgacggggcgcgtaaagcaatgatggcgcaccttagttttgttcacaccaccatgaaacgattcgatgaagatcaggctcgccacgcacggattacccgcctgcccggtgagcataatgagcattcgagggagaaaaacgcatgattatttccgcagccagcgattatcgcgccgcagcgcaacgcattctgccgccgttcctgttccactatatggatggtggtgcatattctgaatacacgctgcgccgcaacgtggaagatttgtcagaagtggcgctgcgccagcgtattctgaaaaacatgtccgacttaagcctggaaacaacgctgtttaatgagaaattgtcgatgccggtggcactggctccggtgggtttgtgtggcatgtatgcgcgtcgtggcgaagttcaggcagccaaagcggcggacgcgcatggtattccgtttactctctcgacggtttccgtttgcccgattgaagaagtcgcgccagccatcaagcgcccaatgtggttccagctttatgtactgcgcgatcgcggctttatgcgtaacgcgctggagcgagcaaaagcagcgggttgttcgacgctggttttcaccgtggatatgccgacaccgggcgcacgctaccgtgatgcgcattcaggtatgagcggcccgaacgcggcaatgcgccgctacttgcaagcggtgacacatccgcaatgggcgtgggatgtgggcctgaacggtcgtccacatgatttaggtaatatctcagcttatctcggcaaaccgaccggactggaagattacatcggctggctggggaataacttcgatccgtccatctcatggaaagaccttgaatggatccgcgatttctgggatggcccgatggtgatcaaagggatcctcgatccggaagatgcgcgcgatgcagtacgttttggtgctgatggaattgtggtttctaaccacggtggccgccagctggacggtgtactctcttccgcccgtgcactgcctgctattgcagatgcggtgaaaggtgatatagccattctggcggatagcggaattcgtaacgggcttgatgtcgtgcgtatgattgcgctcggtgccgacaccgtactgctgggtcgtgctttcttgtatgcgctggcaacagcgggccaggcgggtgtagctaacctgctaaatctgatcgaaaaagagatgaaagtggcgatgacgctgactggcgcgaaatcgatcagcgaaattacgcaagattcgctggtgcaggggctgggtaaagagttgcctgcggcactggccccgatggcgaaagggaatgcggcatagtcgtttgcgccccctccccctaaccctctccctcagggagctgtctcttgatcagatctcctgatcaagagacagggggaggccggggtgaggggaaaaggccgcactgctcaccaattttctgctatcctgcccccgcactaagggggcagtatgctaaacatcgtactttacgaaccagaaattccgccaaatactggcaacatcatccgtctttgcgctaataccggctttcgtctgcatatcatcgaaccgatgggatttgcctgggacgataagcgcctgcgccgcgcggggctggactatcacgagtttaccgccgttacgcgtcatcatgactttcgcgcgttcctcgaagcagaaaatccccagcgcctgtttgccctcaccacgaaaggtacgcctgctcacagcgccgtaagctatcaggatggcgattatctgatgttcggcccggaaacacgcggcctgccagcgagcattcttgatgccctgcccgctgaacaaaaaattcgcattccgatggtgccggacagccgcagcatgaacctgtccaatgcggtgtcagttgtggtgtatgaagcctggcggcagctgggatatccgggagcgttgttgagagattagttactgtatgccggatagatgattacatcgcatccggcacgatcacaggacattagatcccatccccatactcaaatgtatggttaataccgttgaaatgctggtccatatccattgatggcttatcgctgtctggtttaccgacaatacgagccggaacgccagcggcggttgtatgcggcggcaccggttgcagcaccacggaacctgcgccaatcttcgcgccgcgaccaacttcaatattgccgaggattttcgcgcccgcgccaatcatcacaccttcacgaattttcgggtgacggtcaccaccagatttacccgtaccgccaagcgtcacagattgcagaatcgatacgtcgttttcaattaccgccgtttcacccacaacgatgcccgtggcgtggtcgagcataatgccacggccaatttttgctgccgggtgaatatcgacctggaacgtcacagaaacctggttttgcagaaagattgccaatgcgcgacgcccctgattccacaaccagtgaccgatgcgataggcctgcaaggcatgaaaacccttcaggtataacaacggggttgagtatttatcgactgccgggtcgcgggtacgcaccgcctgaatatcacaggccgcagaggcgatcatttccgggtcagcggcgtaggcttcttccaccacttcacggatagcaatagcaggcataattggcgatgacagcttgttcgccagcatgtagctcagtgcacttccaaggttttcgtgcttgagtagcgtcgcgtggtaaaaactggccagcattggctcacagtccgccagcgttctggcttcggctttaatattgttccagacaatttccagttcttcacacgacattgcttactccacacgatgagataatgaccggcccgttctgcgcgggccgggtcatagcggtaacaaaggttccctggggttagtggctgctgcgctcgtccttgcgtgcacgacctaataacgtcaatgctgcctcgcgcgcgttttttccgcaatataatacttgataaatttcctcggttattggcatttctacgccgaagcgatgcgccagttcgcggacttctttcgtattgcggtagccttccaccacctgaccaatcttctcctgcgcgctttgtacatccatgccctgaccgagcatcatgccaaaacggcggttacgcgactggttgtcggtacaggtaagcaccagatcgccaagccccgccatgcccataaaggtggcagggtcggcacccagcgccgcaccaagacgcgacatttcagccagcccacgggtgatcagcgccgtacgcgcattcgcaccaaaaccgataccgtcggacatccccgcaccaatggcaataacgtttttcaccgcgccgccaagctgcacgccaatgaaatccggattgctgtaaacgcggaaacttttgccgcagtgcagcagctgctggagatcatcggcaaaggtctgatcggtcgaggccagcgaaatagctgtcggtaaacctgccgccagttctttcgcaaacgttgggccagagataaccgccagcggaatttgatcgcctaaggcctcacgcgccacgtcctgtaacagacgtccggtttccgcttccagccctttggtcgcccacaccagacgcgcatcaggacgcatcagtggtttaatctggcgcagcacttcaccaaagacatggctgggtacgacgacgagaatattacggctggctgccagcgcagtggcgagatcgctttcaagatggagcgtatcgggaaaaggcacatcggggagaaacgcggcgttacagcggtcgcgttcaagcgttgcgatatgttcagggtcatggccccagaggacaacctcgtggccatttcttgccagggtgatggcaagagcggtgccgtacgagccggcaccgatcacagtcattgaagcattacgttggttcatcaggcatcctgatgttcttcagtaccttcgccagcctgctgctgcaaatagttcatgaacagcgcatcgaagttaaccggcgcaaggttcagttgcgggaatgtaccgcgggataccatgctggtgatgcactcacgagcatacgggaacagaatgttcgggcagtatgctcccaggcaatgcgccatctgggtgccttcgatacccgcgatggagaaaataccgccctgctgaacttcacacaggaacgcggtttcttcgcccaaagaggccgttacggtaacacgcagtaccacttcgtatacgtcatctgccagttgggaagatgccgtatccagatcaagtttaacttctggttgccaatctttctggaaaacgtgcggcgcgttcggcgcttcgaaagagatatccttggtataaatacgttggatctggaaagtcatttcagtgttgttttgttctgacatgtgtagaaaacccttaagtgttgtccttaaatactgcgcaatgtaatgccaacgttcacacgttatttcagcaggggatccagtccaccacgtgcatccaatgcatacaagtcatcacagccgccaatgtgctgtgcgtcaataaaaatctggggaaccgtggtgcgaccgctgcgtttgatcatctcttcacgcttggcggcgttgccatcgatcggcagctcctggaaactcacgcccttgctgctcagcagtgcttttgcacgatggcaatacgggcaggtttctttggtatagatttcaacattggccataaattagctcctgtttttttaccctgaaatttcatgttgcagggcggcagcaaaatggagtgtccccagaagcttataacaataagtcgctgggggcctaattgcagctaacggcctgcatcatgaaagacgacaggtaaattatttgccgcgcaccaaaggcaagttttcgccagcccagccagcgacgccttctttcagcacgaatacttgcgcaaaaccagctttcgtcagtgcgtttgcaggctcctggcactgcatgccagaaccgtctaccacgataaccggtttgtctttgtgcttctcaagctcaccaacattgttggctttgatttcgctcggcaacagattaatagaacctgcgatatggcctttacggaagtcatcacgctgacgtaaatccacaaccacagcgtcttctttgttgatcagacgcgtagcttcaccacgagtaatcaccttcactttcgaggtcaggctcttaaacgtagtcacaagaaccgccaccagtaacgcgatccaggcgatactcagtatgggatgacggccaacaaattgcataatttcttgcatggggggtaacaactcccgacgtagtgattaaaaaaaccaggaaaggagtatacctgcgcggtgcggcaaatacagccagcgcgttaactggaatgcaattttgcggggcgcgacgaaaaaaaagcgtaaatctggcatcggcttgccgcgagcggtcgtatattttgatcttcagaggctattttatcgattcagctgtagtaaaattacgcaaattttgactcttgagtatgaggttgtcgcaatgttggtttctaaaaaacctatggtactggtgattctggatggctatggctatcgcgaagaacagcaggataacgccatttttagtgctaaaaccccggtaatggatgcactgtgggccaatcgtccgcataccctaatcgacgcttccggtctggaagtcggtctgcctgaccgtcagatgggtaactccgaagtaggccacgttaacctgggtgccggccgcatcgtgtatcaggacctgactcgtctggacgttgaaatcaaagatcgcgctttctttgctaatccggtgctgactggcgcggtagataaagcgaaaaacgcaggcaaagcggtacacattatgggtctgctctccgcaggcggcgtacacagccacgaagatcacatcatggcgatggtagaactggcagctgaacgcggcgcagaaaaaatctacctgcacgcattccttgacggtcgcgacactccgccgcgcagtgctgaatcctcgctgaaaaaattcgaagaaaaatttgccgcgctgggcaaaggccgcgtagcgtccatcattggtcgttactacgcgatggaccgcgataaccgttgggatcgcgtagaaaaagcttatgacctgctgactctggcgcagggcgagttccaggccgataccgccgttgctggtttgcaggctgcttatgctcgcgacgaaaatgatgaattcgtgaaagcgaccgttatccgtgctgaaggtcagccagacgcggcaatggaagacggcgatgcactgattttcatgaacttccgtgctgaccgcgcgcgtgaaatcactcgtgctttcgtgaacgctgatttcgatggcttcgcgcgtaagaaagtggttaacgtcgatttcgtgatgctgaccgaatacgccgctgacatcaaaactgcggttgcttacccacccgcttccctggttaacaccttcggcgagtggatggcgaaaaacgacaaaactcagttgcgtatttccgaaaccgaaaaatatgcccacgttactttcttcttcaacggtggcgtagaagagtcgttcaaaggcgaagatcgcattctgatcaactcaccgaaagtggctacctacgatctgcaaccggaaatgagctccgcagagctgaccgaaaaactggttgcggccatcaagagcggcaaatacgacaccatcatctgtaactatccgaacggcgacatggtaggtcacaccggggtgatggaagcggcggttaaagcggttgaagcgctggatcactgcgtggaagaagtcgcgaaagcggttgagtccgtgggtggacaactgctgatcaccgctgaccacggtaacgctgagcagatgcgcgatccggcaacgggtcaggcacacacggcacacaccaacctgccagttccgctgatttacgttggtgataagaacgtgaaagcggttgaaggcggcaaactttctgacatcgcgccgaccatgttgtcgctgatgggtatggaaatcccgcaagagatgactggtaagccgctgttcatcgtggaataatccctccccatgaggggaaaggcgattaataccatgacacgggccgtgaaaccgcgcaggtttgcaatcaggcccatcatctacgccagcgttcttagcgctggcgtattgttgtgcgccttttccgcccacgcggatgagcgtgaccaactcaaatctattcaggctgacatcgccgcaaaagagcgcgcggtacgccaaaagcaacaacaacgcgcaagcctgctcgcacaattgaaaaagcaggaagaagcgatctctgaagccacccgtaagctgcgcgaaacgcaaaacacgctcaatcaactcaataaacagattgatgagatgaacgcgtcgattgccaaactggagcagcaaaaagccgcccaggagcgcagcctcgccgcacaactggatgccgcattccgtcagggcgagcataccggtattcagctgattctcagcggtgaagaaagccagcgtggacagcgtttacaggcttatttcggctatctcaaccaggcgcgacaagaaaccattgcccagttgaagcaaacgcgtgaagaagtcgccatgcagcgtgctgaactggaagagaaacagagcgagcaacaaacgctgttatatgagcagcgcgcccaacaggcgaaactgactcaggcgctgaacgagcgtaaaaagacgctggcagggctggagtcttccatccagcaaggtcagcaacagttgagcgagctgcgcgccaacgaatcccgtctgcgtaacagcattgcccgtgcggaagccgcggcgaaagcgcgtgcagaacgagaagcacgtgaggcccaggcggttcgcgaccgccagaaagaagcgacgcgcaaaggcaccacctacaaaccgaccgaaagcgaaaaatcgctgatgtcccgtaccggtggtctgggcgcgccgcgtggtcaggcattctggccggttcgcgggccgacgctgcatcgctatggcgaacagctacagggtgaattacgctggaaaggtatggttatcggtgcttctgaaggtactgaagttaaagcgattgccgacggtcgggtgattctggctgactggctgcaaggctacggtctggtggtggtggttgagcatggtaaaggcgacatgagtctttacggctataatcagagcgcactggtgagcgttggttcgcaggttcgcgcgggccagccgattgcactggtgggcagcagtggcggtcagggtcggccttcactctatttcgaaattcgccgccagggtcaggcggtcaatccacagccgtggttgggaagataagttttgtttccatttcgtcgtaacgttcttgcatttgccgctctgttggcgctctcctcccccgtacttgctggcaaacttgccatcgtcattgatgattttgggtatcgcccgcacaacgaaaaccaggtgctggcgatgccttccgctatctccgtcgctgtattacccgattcaccgcacgccagagagatggcgaccaaagcgcataacagcgggcacgaagtgttgattcatctcccgatggcaccgttgagtaaacagccgctggagaaaaatacgctacgcccggagatgagcagcgacgaaattgagcgcattattcgtagtgcggtcaataacgtgccctatgccgtggggatcaacaaccacatgggcagcaagatgacctctaacctgtttggtatgcagaaagtgatgcaggcgctggagcgttacaatctttacttcctcgacagcgtaaccatcggtaatacccaggcgatgcgcgccgcgcaaggcactggcgtgaaggtgatcaaacggaaggtattcctcgacgattcgcaaaatgaagcggacatccgtgtgcaatttaatcgcgcaattgacctggcgcgtcgcaacggttcgaccattgccattgggcatcctcaccctgcaacggtacgcgtgttgcaacagatggtttataacctgccgccagacattacgctggtgaaagccagcagcttgctgaatgaaccgcaggttgatacttctacaccgccgaaaaacgctgtgcctgatgcaccgcgtaatccgttccgtggcgtgaagctgtgcaaaccgaagaaaccgatagaacctgtttatgctaatcgcttctttgaagtattaagcgaaagcatcagccagagcacgctgatcgtttacttccagcatcagtggcaaggctggggcaaacagcccgaagcggcgaagtttaacgctagcgcaaattaaaggcgctacgcgtaatgcgatggtgcgaccgcgttttgtcgcgccattgccataagcggaaagaccacagtaacgcctggtaaccgaccttcacgctgcgcacattggtaatcaggcgcttatacataccggaagtaaatatctcggcaatcatccgttggcgggtaagaatatccggctctttgcgcaccgcatggcaaacacgcaatgcctcgtaagttatttgctgatgaaattccggataaatcataattttgtcggcataatttcgatttaatttctccagcaggcgggtaatcttaatatagtgacgttgataattaaggtttttattcccttgtctatgcaaccgactcactgacgtattatgcagataatatttatataatgattgctcggtatatcgcgcacgcagcgcgttaaacatgaattctgttgtccagacaatatcctgatgatgtaatccggcaataaatttaatgttatttttaacaataacatcacggcgataaacccccatccagacaacgtgagtccaacggcgcgaagaaagccccatccgcagccagtccgggccggttaatacgccggttgagcgaaggcgatcggtggggatggattgccaggtttctcccgtttcacgaaaacaccagtcagcgttgcactgcgccacgtcgaggtcgtcctctaacgccatggtcatcagcgtttcgtacatggtgggatagacttcatcgtcagcatcgacaaaagcgacatatttgcccgttgccacttcaatcccacgattacgcgccaccgatgcgccagcattcgcctgatgcaacaaacgaacgtgcggatagttttctgcgtaatactttgctatttcaacagaattatccgttgaaccatcgttaataataatgatttccagagcagtccaggtttgcgtaattaaagattccatacaagtgcggaaatcatcgcccgcattatataacggaataataacactaagtttattggtgctgttcatcataaattaccgacgacctctgaagttatcctgacgttttacaggctttgtattaagaaactattaagcctgtgagatattatttttacaggtgagagagtcacttcagggtagagagataatgagagcagctatataagagatcagcacaattacgaactctttattacactgacaggattttacatatttaacagattatcctcagataaaagggctggaataccagcccttgttcgtgttaatcccagctcagaataactttcccggactggcccgaacgcatagcgtcaaagcccttctggaaatcatcgatagagaaacgatgggtaatgatcggcgaaagatcgaggccagactgaatcagcgccgccatcttgtaccaggtttcaaacatctcacgaccgtaaatacctttaatgaacaagcctttaaagatcactttggtccagtcgatagacatatcagacggcggaatacccagcatcgcaatacggccgccgtggttcatggtgtcaagcatggtacgaaacgctggcggcgcaccggacatttccagaccgacatcaaaaccttcggtcatgcctaactccgccatcacgtcattgagattttctttggcgacgttaaccgcacgggtgatacccattttacgcgccagctcaaggcggtattcgttaacatcagtgatcaccacattgcgtgcaccaacgtgtttcgccaccgccgctgccataataccaatcgggcctgcaccagaaaccagcacatcttcgcccaccagatcaaacgacagcgcggtatgcacggcgttaccgaagggatcaaaaattgcggctaagtcatcggaaatattgtcggggattttgaaggcgttgaatgccgggatcaccagatattcggcaaagcagcccgggcgattaacaccaacgcctatcgtgttgcggcacaaatgggtacgaccaccacgacagttgcggcaatgaccacaggtgatatggccttcgccagaaacgcgatcgccgatcttgaagcctttcacttcctgaccaatacctaccacttcaccgacatattcatggcccacgaccatcggcaccgggatggttttttgcgaccactcatcccagttatagatgtgaacgtcagtcccgcagatggctgttttacggattttaatcagcagatcgttatgcccgagttccggtacaggaacgtcggtcatccagatgccctcttccgctttcagtttggataacgctttcatctcacatcctcaggcgataacgcccagttgtttaccaatacgcgtaaatgcttctactgcacgcgtaatttgctcaggggtatgcgccgcagacatctgggtacgaatacgcgcctgacctttcggaacgaccggatagaagaaaccggtaacgtaaatgccctctttttgcagctcacgggcaaatttctgcgccactaccgcatcaccaagcatgaccggaataatggcgtgatcggctcccgccagggtaaagcccgccgccgacatttgctcacggaactgacgcgcgttcgcccacagacggtcacgcagttcgctgcccgcttcgaccatctccagtactttgatggacgcggcaacaatggccggtgccagcgagttggagaacaggtacggacgagaacgctggcgcagccactcaaccacttctttgcgcgccgcggtataaccaccagaagccccgcccagcgctttaccaagcgtaccggtgataatatcgacccggcccatcacatcgcagtattcatgggaaccacgaccattttcaccgacaaaaccgaccgcgtgggagtcgtctaccatcaccagggcatcatatttatctgccagatcgcaaacgcccttcaggttggcaatcacgccgtccattgagaacacaccatcggtggcgatcagcacatgacgcgcaccggcttcacgcgcttctttcagacgtgcttccagctcctgcatatcgttgttggcatagcgatagcgtttagctttgcacagacgcacaccatcaataatagacgcgtggttcagtgcgtcggagataatggcgtcttccgcacccagaagcgtttcaaacaggccaccgttagcatcaaagcaggaagagtagagaatcgcatcttccatccccaggaaggccgccagtttttgttcaagctctttatggctgtcctgagtgccgcaaataaaacgcaccgaagccatgccgaaaccgtgagaatccattcccgcctttgccgccgcaatcagatcaggatgattcgccagcccgagatagttgttggcacaaaagttaatgacgtggcttccatcagccacagtgatatctgcttgctgcgcagacgtaataatgcgctcttctttaaacaacccttccgcccgtgcggtttccagatcgttggttaactgctgataaaattctccacgcattgcgattctccagacagggcaaattccagcacatattacccaaacttataggtcgcgacgagataacgcgttaacacttctgcaaaattcaggataaataacgtgtaacttgatgtctctcaacacctacagatagtagaaaaactgtacagttttggctgggcataatgatgattgattttactgcattgatataaaaagaaaaaatgatgccaaagcatcatttttcctatctcagttggtatcaaaacgctacccactaatggagggaaacctattttcttgaaaggaaaattctcagcgcctgcatttttgcccctaaagtgttactcctgaagcagcgaaacaaatcgaaccattttcctctccccagatagtttaggttgaagagatcggggcgtttgtaatagcacatgacaaaaatgccctggtcatcgtccacaatgttattatttagtgttattttttgactttccagaactaatttatagaattctttccatttatgctgtgaaccaacaattgcgcccccaataatatatacatgattgccaatcatgaaatcaaaaacctgttgttgagatgtgacagtaagccctttttttatagtgaaaagatgcatcttactttcatcaaatgggaaatcccaaattttcaatcctcgagttacatttggcttacggcaatagccaaaatctatccacgcaacaagaggcgttttcactaagcccatgttgatagctttatttacaaaataggccttaaggttacataccaaaacatactctggtgaccagtactctgggttttttaattgtcgaggctcaagtctatttgtaaacgactcatctttttgaattttttcgatacgacttctgatatatctaaatttcttttttatatcgataacgataaccgttgttggttttccgttgcgaatcgcttcaacccttggtttcaaatcgggagaagtgaaaataatcatctcattttcaagtgcggccagacgctcaaagtaactaaaataaacatcaactgaacgagctagtttttcacggaaccctttattagcagtccaatcccctctaccaatgtcaaaatatgcagtgataattgtggtggatgatttcattactaataagaccattaatataaaaaaagaattatatcataaatattaatagaatgtatactgtatattatccattcaaatgcttccgttatttatcatacatcggaatattgatactaaagcactattcacatgcaaaaccaacatccgccatgaaggactagctaaaacccaaactagtttgttgcaattagcatccttgcacctctatgtaaagggctgaagggattcggatgtgatggtatgattacagacattcgtgtctgagattgtctctgactccataattcgaaggttacagttatgatcatcgttaccggcggcgcgggctttatcggcagcaacatcgttaaagccctgaatgataaaggcatcaccgatattctggtggtggacaacctgaaagacggcaccaagtttgtgaacctggtggatctgaatatcgcagactatatggataaggaagacttcctgatccagattatggctggcgaagagttcggcgatgtcgaagcgattttccacgaaggcgcgtgctcttccaccaccgagtgggacggcaagtatatgatggataacaactatcaatactccaaggagctgctgcactactgcctggagcgtgaaatcccgttcctgtacgcttcttccgcagccacctacggcggacgcacctccgactttattgaatcccgcgagtacgaaaaaccgttgaacgtctacggttactcaaaattcctgtttgatgaatatgttcgtcaaatcctgcctgaagcgaactcgcagattgttggcttccgttatttcaacgtttatggaccgcgtgaaggccataaaggcagcatggcgagcgtcgctttccatctcaacacccagcttaacaacggtgaatcaccgaagctgtttgaaggtagcgagaacttcaaacgcgacttcgtctatgtgggcgacgtggctgatgtgaatctgtggttcctggaaaatggcgtttccggcatcttcaatctcggtactggtcgtgcggaatccttccaggcggtagctgatgctacgctggcttatcacaagaaaggccagatcgaatacattccgttcccggataaactgaaaggccgctatcaggcgttcactcaggcagatctgacaaatctgcgcgcggcgggttacgacaaaccgttcaaaaccgttgctgaaggtgtaacggaatacatggcctggctgaatcgcgacgcataagagctctgcatgaaaatactggtgatcggcccgtcttgggttggcgacatgatgatgtcgcaaagtctctatcgcacgctccaggcgcgctatccccaggcgataatcgatgtgatggcaccggcatggtgccgtccattattatcgcggatgccggaagttaacgaagctattcctatgcctctcggtcacggagcgctggaaatcggcgaacgccgcaaactgggtcatagcctgcgtgaaaagcgctacgaccgcgcctacgtcttacccaactccttcaaatctgcattagtgcctttcttcgcgggtattcctcatcgcaccggctggcgcggcgagatgcgctacggtttactcaacgatgtacgcgtgctcgataaagaagcctggccgctaatggtggaacgctatatagcgctggcctatgacaaaggcattatgcgcacagcacaagatctgccgcagccattgttatggccgcagttgcaggtgagcgaaggtgaaaaatcatatacctgtaatcaattttcgctttcatcagaacgtccgatgattggtttttgcccgggtgcggagtttggtccggcaaaacgctggccacactaccactatgcggagctggcaaagcagctgattgatgaaggttatcaggtggttctgtttggctcggcgaaagatcatgaagcgggcaatgagattcttgccgctttgaataccgagcagcaggcatggtgtcggaacctggcgggggaaacacagcttgatcaagcggttatcctgattgcagcctgtaaagccattgtcactaacgattctggcctgatgcatgttgcggcggcgctcaatcgtccgctggttgccctgtatggtccgagtagcccggacttcacaccgccgctatcccataaagcgcgcgtgatccgtttgattaccggctatcacaaagtgcgtaaaggtgacgctgcggagggttatcaccagagcttaatcgacattactccccagcgcgtactggaagaactcaacgcgctattgttacaagaggaagcctgacggatgcgggttttgatcgttaaaacatcgtcgatgggcgatgttctccatacgttgcccgcactcactgatgcccagcaggcaatcccagggattaagtttgactgggtggtggaagaagggttcgcacagattccttcctggcacgctgccgttgagcgagttattcctgtggcaatacgtcgctggcgtaaagcctggttctcggcccccataaaagcggaacgcaaagcgtttcgtgaagcgctacaagcagagaactatgacgcagttatcgacgctcaggggctggtaaaaagcgcggcgctggtgacgcgtctggcgcatggcgtaaagcatggcatggactggcaaaccgctcgcgaacctttagccagcctgttttacaatcgtaagcatcatattgcaaaacagcagcacgccgtagaacgcacccgcgaactgtttgccaaaagtttgggctatagcaaaccgcaaacccagggcgattatgctatcgcacagcattttctgacgaacctgcctacagatgctggcgaatatgccgtatttcttcatgcgacgacccgtgatgataaacactggccggaagaacactggcgagaattgattggtttactggctgattcaggaatacggattaaacttccgtggggcgcgccgcatgaggaagaacgggcgaaacgactggcggaaggatttgcttatgttgaagtattgccgaagatgagtctggaaggcgttgcccgcgtgctggccggggctaaatttgtagtgtcagtggatacggggttaagccatttaacggcggcactggatagacccaatatcacggtttatggaccaaccgatccgggattaattggtgggtatgggaagaatcagatggtatgtagggctccaagagaaaatttaattaacctcaacagtcaagcagttttggaaaagttatcatcattataaaggtaaaacatgctaacatcctttaaacttcattcattgaaaccttacactctgaaatcatcaatgattttagagataataacttatatattatgttttttttcaatgataattgcattcgtcgataatactttcagcataaaaatatataatatcactgctatagtttgcttattgtcactaattttacgtggcagacaagaaaattataatataaaaaaccttattcttcccctttctatatttttaataggcttgcttgatttaatttggtattctgcgtttaaagtagataattcgccatttcgtgctacttaccatagttatttaaatactgccaaaatatttatatttggttcttttattgttttcttgacactaactagccagctaaaatcaaaaaaagagagtgtattatacactttgtattctctgtcatttctaattgctggatatgcaatgtatattaatagcattcatgaaaatgaccgcatttcttttggtgtaggaacggcaacaggagcagcatattcaacaatgctaatagggatagttagtggcgttgcgattctttatactaagaaaaatcatccttttttatttttattaaatagttgcgcggtactttatgttctggcgctaacacaaaccagagcaaccctactcctgttccctataatttgtgttgctgcattaatagcttattataataaatcacccaagaaattcacttcctctattgttctactaattgctatattagctagcattgttattatatttaataaaccaatacagaatcgctataatgaagcattaaatgacttaaacagttataccaatgctaatagtgttacttccctaggtgcaagactggcaatgtacgaaattggtttaaatatattcataaagtcacctttttcatttagatcagcagagtcacgcgctgaaagtatgaatttgttagttgcagaacacaataggctaagaggggcattggagttttctaacgtacatctacataatgagataattgaagcagggtcactgaaaggtctgatgggaattttttccacacttttcctctatttttcactattttatatagcatataaaaaacgagctttgggtttgttgatattaacgcttggcattgtggggattggactcagtgatgtgatcatatgggcacgcagcattccaattatcattatatccgctatagtcctcttactcgtcattaataatcgtaacaatacaattaattaagaataaacaagtttaagaagtgagttaaaactcacttcttatctatacaacttaatctctttactgaattagttaaagtttcagtatcgatatcttttaccgtatatgttggggatactatttgtatagatttatgatgattcggggaccaaattaaatgcgagggatattccggagtacgtgaattagggtaaaatgcaagcgttggtttatgataagccgcagcgatatgaacaagagctgtatcaacagaaatgacaaaatcactatacttggtcaacgcaacggtataaataaactcatcaaatggtagtgtttcgatttcaagtattggtattgtcaataaatcttgcggtaacccggtaaatataatccgataattttcaaagtgtgttttcacttcttgatatataacttttatttgctcaaacgtaagacggcatattttttttgcacctaatggattaataatgactattcttgtatctccaataaattcttttattttatcttcaacatctactggtaaatgcaagtcgtagttggtggaaaatttaccctcaccataaatatgcttcagtatttctattgctcgtgtactcatatgttcttttaaacattcatcgtggggatggtaaaatgaatagtaacgcttataccaatgatcaaaacccagaatgtaagaatcttttaaacttgataatattaagctatgcttaaatgagggcatagtttcaaaggggtctaatataatatcgaactgtaaatcccgcagatgcttacatagagtaagcatttcaagaaaaccggttgattctttaatacagaactcaaatatatttttattattagagagaaattccccaccctttctatttgtgagaagagttattttaacccctttactataaagttcacgataaatcgaacttaatacaattagatcaccaagtttattattatcatgaataataaggcatgatttaacttgtgctggatctgtaatttgattatttattttattacgaaataaaaaagaaaggaaattaatcttgattttgtttatataaaatcttttctttttgtgaaaagttcctaagcgcatttttataccatattattttagtttcaggatgattaattagcataagaatcggttgaagttctatattgcattttttttcttgtcatatcttttgattcttctgcactgatgtcttgaagtttaataaatggaattacatcgtaagaaatagctgtatcatctgataaattataaatattaatatcttttacattatcatgcataaaacgaaaaaatggcaatattttgaataaatccctacttaattccgagggcatgggatttttattctcatcatagaaacgagaacagctacccgttaaatcaagaccagaacaaataatccgcgcatacttaagtgaatatgcgatttgaattgcagcaaaggcaatagtatggcatgagcaataaccaagactaatgtccttgcaaaatccaaccagacgaccttttttagacaacggtacagagatcagcagttctttgtgaatctgtctcaaaatattaaatttaatcttctttataaaaccacctttttcccgacggtaaaaggaccgtaatacgaggcagttctggaggatataaagtttatcttctttggaagcgtgttcataaacgtcaacgtttactatggtataacgacttctctggctaaatttataaaaatcatcacgacgctgatgtaaaaatcggacatctgtaagtacatatataaaaggaacgatattattacttaacagatattgcgcagaaccattgacagcaataatatcctttgttcgtaatactgacaaaggtgttttttgcgatgtagggcccgaaagaaaaataataacatcatcagatgttttattttcaatcaggttttcaacatcttttttgtcaatgtatctaatattcttcatgataaacctgtgaaataaataactccgcttaaaactgtcctggtgaagacatgtaattgtgggattttttttagcgcgctggtttccctttcaaacgccgcataaaattgcgcatttttttacgatatactaaaagataatagcctagatctctaatctcatttttaataccgtaatgacgctctaagtcaatacgatctttcgctttacgctgcgctgaagcacgctttccggagagatcgataattcgaacctcaccattttttataatgaagttaccacgatgggggtcgccagaaaccatgccatgttgatgtaaggcattaattgattgctgaattttattttttagcgcatcatcaatatcgggcatatcacacaactctatgccatcaatatactcgatgatcatgatataagtatggacaaaacgtaaggttttccgttcagccaataaataaaagtcattgagtgtatttaacccttcatttcgtactttttgggtttgctcaaaaaggcgttcgtaataatcaccttttaacagagacttaaagaaacgttcgttacgcttaactttcggagaaaaaaccttaagaatcaatttaccgtaatcggtatcaataagcataacttttgtatcatcaatagaacgaaaaaccttgatgatatttatattataagacaagaagtcatttaatacattgaggtactttgaattgttttcatcggtaaaaacaaccaagtctttgatcttgctcttctgaatcataataaaccagttaaatgttatttacggtaatattttcggcaaagataacagactcctgctataattcctgagatataatgatgttgcactaaaagatgtttatatctttttttaaattcaataattgatttcgcatctcgtggagagtcatctttccagggggaattttctaaagctattttatagtattttaccgatggataaattgcccatttgtgccacggtttagttgcacctgtataatgaataagaagagtactttctgtaatcagctttttatagttttgatgtgttttgtcttttaattcacttttaattgtataaattgtattgtactcacgaggcaaaaataatgtcatccctttcagtaagacattcataacatcctgatcagggtatttataaacattatctttactcataagaatagacaacgctttttctgttagttttgcgtcagcccatttttttaagtctaaataaacgacaccggaattaaagtactgcccaagtaattcaggatcagacaacctggataccgccttttcttgcattggctcaacatctttaacaacagcagcaaccgctccatttaaacccagatgtaatagttggctaatatcgcctttacaaacaacatctgcatcaagataaagcaaacgatcaagcgttaaacccaataattgaaatgcaaataaacggaagtacattgctcttgaccagacctgtgtacaaggcaagcactggagcttatcagtgttaattctatataacgtgattcttaattggttttgctctgcaagctttgcaattttttgaaaaaaaccatcattataaacatcagcaataatataaaaatcaagattaatatgtcgattatttaggacaattgatgtgatggaaacacctacaccatcaagataattagcatcgacaccataggcaacatttaaacattcagaagtatttatattagctagccgaaaatcccaggctttaactttatctatctctatggcaggaaatgagtccacaatgctacccttatatcattactttatagtttcccagttttaatgctttatcttttcaataaaataaaaaagatagttgctaaatccttttagatatctatgctttttaagcatatgttttgcgctatatcttaattgattgctattgttcggtttcagcaacgccgtattcttccatggcgaagcattttttgcctccataaaggcttgtgatacaggataatcccaggcccaatcatgccagggcttggttggcccgatataatggataaaaatagtatcgttggttactgggtttataaagctttctttgagttgataatttaagctgaactgggtgttatatttaatatcagcgaaaataagtttatccgccagcaacatatttaacacatcctgatcaggatgtgttatttttttgattatttctggctcatttagcattgcaatagctcgtgcagaaacctgctgagccgcccattgggcagtattaatcaataaaaaaccggagttaaagtaacctttagcaattcccgcaacacctaacgaatgggcgcgtttttcccaccagtcagcttgcccttctgtaacaaccattgcgactttatcgtcaggaaatgagaaattaattagtggctcaatagtcccctgacaaatgatatctgcatccagataaaggactttaggcgccttattaataaagtaatctgcaataacaaaacgaaaatatattgcatgagtccaattcttagtgctaggcaatgagcgcagtcgatcaccattaatcagatatattttaattctggttttatactgcaacgccagggcatcaaaatacttacgatcatcatcaccaaaataatcagtaaaaatatggaaacacaatcgacttccttcattatattttaatattgaagcaatcgaaattccgcaaccaaatagaaagtttttgtcagttccataagcgatgtccagacaaagattttctgtttctactttatgatcataatcaataactgaattaagaaactcagtttcctggaaaaacacctgctgcattatttcctccgggaaatagcagaaataattaccttatgtaatctatcgtaatacttcgattggtaaaattcatcgatcgacgcaggaattttttcatgttcgatatgaatttcacctgctatatatttatttagaagagttacaaaaccagcaatatctcccggttgatacagatggccattgacatcaggttgaataatgtcagcaggcccggagacacaatcggcactgatacaaggaatcccccacgacaaggcttcaagtagggtcattgggaaaccttcaaaagatgacgtgagcaataacgcactcactttttcaatatcttgctggaccaattcccagggatattgttgccaaccataccagacaattcgatcatcaatatttaattctctaccataagcctggcatttttcgaaatcggagccatcacccaatacatggagtttccagttacctttcgcttgtgataagccatcaagcaggtctttaactcttttctggccttcaaatttcatacgcccaacataaataaacgttgccgtttcaccttcctcgggcgcgggaatgactgagtctttagtttcgacgggattaaaaataacatttatcgtcgattctgctacacctcgattaatcatttgctgtttaatgccagagctgattgctaaatgatagtcggcacaggtgatatattcagcatgttttttgtgatctaaagaaaaatgtggccatgaaaatactggcatatcaattcctgattttttacgtgcttttgcggcaaacaggcaggagatcacatcaatacaaataacgatatctggttggtactcctgaagccatttacttagagcataaatatgtttcgcccgacgcaaaaaacctaaacgaatattggaaaatgaacatgagtatttaataccttccagccatcccttatccattttgtcattacgacaaaagaaaaacatttcactttggatatgttgttgcctgaaggtagtaataacatcacggatgacagtttccatgccgccaaatccagaaacagcttcgccgataaacgctattttcatagaaactctcattaattgagtaaaactcactgttttaacggttttatttgtctataaaatcagaaacaatcgttgacatcattttatctggactgaatttatataaactatcataatccattggtttaacagatgagttaataaaatactctaacttatcccaatcatcatgacctattataaaaaagcgagattcactatagatttctgaaccaaatacatttatattattagtaattaattttttattgaaaaatagtgcctcaagtatacgaagagtccagccagattggttttctttggttatatcaacaattatattagcatttaattttcttctaatattctcttcataagatatttgtttttcaatcaaatactttgaagtcgtagatgatgtcttatctttgacaacattaaaatctagcttacatcctagtgttgttaatctctcggctaactcattaattatttgaagacgccctttatcacgaccaaggaaaaaacatattggctggctgttatttttgtcagataaactataatttctaatttcatccattcctataggaaaaaattgttctattgccttgatcttttcattccctataaatctatgctcaaaatcatatataatatcgaaataattcgcgttatcaagaataaaatcttcgccaacagtatttcttagaagcaaaactttatgacagttaatattttttaatatttgtttattgatacctttattaacaacactgtcattaatgataattatgtcatcttttttaatatcattgcggtaatgcttgatgaataatcgccccagccatgcattatccatccctatttttgatatttttttattaatccagttatatttttttggtgttgttatattttttatcttgtacttttttttcaggtactgaatcatttttaattcataatctgcaacccaatttataaaataaatagtcataataaagttagttccagtacatactaataaatatttttataatcctttgcgttgtgttcgctctttaatacgctcggccttaacgcttgccatgttcaataaattctgttcaagagacaatattttgcgtaaaggcatcccaaaataaaccttcataaatcgccagatatctctttgcgtcaggccaatattcattgatgagaaatataaaccaatcaggtctttatcgcgccagcggcgcggtacttttgcacgtatctgtgcccgatgcagatcgataactgaaatttttaattcatcttcccggccagtaaatggcaaatgaagcaaaaagtggcaaatgtaacagtcgcggtgatttatccctgcagtatgcattttacgcaccatagttgctacacgtgcgatcagcatacgcttaacacgtatatcaggcgggttgactgcccaatcggcacaataatcttcaaggctaattgtgggagtgagatcttcggtaataataaatgatgcgcgagttaatggatttaaccctttttcgccaaacccaatgcccttcattgtatcaacgccaacatcactcaggcgatgaatagcgtgccactctctgtctgcgcccaaaacgggcatccgcaatgagagtagattttttataatctcttttaatgtcgtccccttgtgccatttaagaaaatagcttttcccggacagttcaaagcgtaatgtacgacgagtctccagttcacgaaagacctcgccgttcagttttttgacctctgcaaaagcatctttaccacgccaaagtgtggcaagcggctcttttaattcaaccatctaaaccacctgtaatgatatccgcggctttttctggcaagctatacaaatcctgagtatcggcataatggcgagcattctccgcccaggccattcgcaatggcgactgagttaacgctttacgtaaaacttcatttaattgttcctgagagaaaggttcagcgatgaccgttccacaattggcatccgcaatataatgcgcgtacccacataccgctgttgttaaaacaggtaacccagcagtgatcgcttctagaagaacgatacccgcggcttcctgataagcgggatgcagtaataaatcagcggctgccattaattctgacacatcattgcgaccggagaagaaatgcacattgctccgcacgccgagtttttctgccagcgcttcaaattttcgcggcttatcctgaccaacaacaaataaaagcgtattgtgacgtaatgattccggtaacgatgccaaagcttcaattgagcgatctacacctttacggccaaaatctgatccaacctgcagtaataagttttgttgctcttttatgccatttttctggcgataaatttcacggctgtttgggatttgctcactgtattttctgtccggataaataccgggaggaagaatttgaaaacgttcaggttcagtttgataatgcttctggaaatcggcgatttgcttatcggtcagcatcataagtttcgtcgatttaccctgctcgaaagtcgctcgctcaaatgcggcataatggcgatatcgtgatgttaaacgatataaaaaacctttttcttgcgcaactttctcggcgtaacaaacatcagcggcaaaataaacatccaggccaggcatcttattaaacccaacaacgcgatctgcgggatgctctttgagatgattttgtacccaggcataatattctgcattgcgtccatggttggtatgggacttaactggcacctgaataagctcaaatgctttcgggcaatcgccttcccacgactgtgtatatacccgaacatggtggccccgtgcggcaactgttgatgcaatgcgcataaagtcacgttgaagcccaccaaatggaaaatatttatataaacaaaacgccacgatcataattgtgcattcctgtcagctgaaggggcatcttctggcaacagcttttccgtagcggcgatcacatcctccgctgggataacagaaagatattttttgttgcggtcaagttcatgccgggtcggcattttctgataattccccgcccagaattgaataatattctcggtccagggacgccagaatacgtgatccgttgcaccaaatagactaatgactggcgttttcactgccgctgcaatatgtcccggcgcagaatccacaccaataaaaagcactgcatgatcaattaatgcacccagttcaggaaaacgtgttttacctgcaaggccagtaatgggttttgtttcgcaacctcgtgcaatctcatctacacaagcgagatcatctgccgagggcccacaggttagcacaacctgatagcctcgctgttgcagcgcatcgataaccttagaaaatttatcgttatcccaacacttaaatatctgacgcgctgtcggttggatgacaacataatgatcttttacgcccagggcatctaattcccggcgcatcttcttccagcaatcttcggcgtaactcattgttgtgtcggtgtagaaatcggtaatacctaatggctcaaggaccgataaattacgctcaacaatatgtgtaccgtgtattggcgctaagtgtgtgaagctttttttccaaataccatgctgccgatgaccataaagttgcgatattttcatccgtgcaggtaaacaacgtaccagcagcgccaccatccactgatccgtaagattaatgaccaggtcataattattcgcacgcagagtttttatcaacgaaagcacatttttaattttatcgaaagttcccgcacctttattgcttatcccatagagcgcattaatttccgggttttcagacaaaatagggatggtgtcctgataaagcagcatatcgatttttgcatcaggataattctgcttgagcgtactgatgacaggagtagttaataacatatccccatgatatcgcatctttatgaccaggatttttcgaaatggcttttccactagcgactcttttgtgtgattgtctggttaagttaagcagaaaaaagcacgctaccgccccaggctcaacagctacctgaatactgataacgcacttactttgacgtgctagtgtatcatttctttcgcagcaatccgacccgaatgatttttatacacaaaatatactttaatcataaaaatcaaatagataaaaaatagcatttcgataatgtcagtacggcctatgtagatttgaaaatggggccgagtttcaatgaatcgcataaaaatacaaaaaaaatgaagatgtagcggcagatcagaccaaactgaagctatttaagtcaaaaacgggaaaagtaatggtaaagccacagctaaatacatagaatccccagcacatccataagtcagctatttactatgctcgaattgctttacaccgcccttctctaccttattcagccgctgatctggatacggctctgggtgcgcggacgtaaggctccggcctatcgaaaacgctggggtgaacgttacggtttttaccgccatccgctaaaaccaggcggcattatgctgcactccgtctccgtcggtgaaactctggcggcaatcccgttggtgcgcgcgctgcgtcatcgttatcctgatttaccgattaccgtaacaaccatgacgccaaccggttcggagcgcgtacaatcggctttcgggaaggatgttcagcacgtttatctgccgtatgatctgcccgatgcactcaaccgtttcctgaataaagtcgaccctaaactggtgttgattatggaaaccgaactatggcctaacctgattgcggcgctacataaacgtaaaattccgctggtgatcgctaacgcgcgactctctgcccgctcggccgcaggttatgccaaactgggtaaattcgtccgtcgcttgctgcgtcgtattacgctgattgctgcgcaaaatgaagaagatggtgcacgttttgtggcgctgggcgcaaaaaataatcaggtgaccgttaccggtagcctgaaattcgatatttctgtaacgccgcagttggctgctaaagccgtgacgctgcgccgccagtgggcaccacaccgcccggtatggattgccaccagcactcacgaaggcgaagagagtgtggtgatcgccgcacatcaggcattgttacagcaattcccgaatttattgctcatcctggtaccccgtcatccggaacgcttcccggatgcgattaaccttgtccgccaggctggactaagctatatcacacgctcttcaggggaagtcccctccaccagcacgcaggttgtggttggcgatacgatgggcgagttgatgttactgtatggcattgccgatctcgcctttgttggcggttcactggttgaacgtggtgggcataatccgctggaagctgccgcacacgctattccggtattgatggggccgcatacttttaactttaaagacatttgcgcgcggctggagcaggcaagcgggctgattaccgttaccgatgccactacgcttgcaaaagaggtttcctctttactcaccgacgccgattaccgtagtttctatggccgtcatgccgttgaagtactgtatcaaaaccagggcgcgctacagcgtctgcttcaactgctggaaccttacctgccaccgaaaacgcattgaggttgttatgcaaaaacgggcgatttatccgggtactttcgatcccattaccaatggtcatatcgatatcgtgacgcgcgccacgcagatgttcgatcacgttattctggcgattgccgccagccccagtaaaaaaccgatgtttaccctggaagagcgtgtggcactggcacagcaggcaaccgcgcatctggggaacgtggaagtggtcgggtttagtgatttgatggcgaacttcgcccgtaatcaacacgctacggtgctgattcgtggcctgcgtgcggtggcagattttgaatatgaaatgcagctggcgcatatgaatcgccacttaatgccggaactggaaagtgtgtttctgatgccgtcgaaagagtggtcgtttatctcttcatcgttggtgaaagaggtggcgcgccatcagggcgatgtcacccatttcctgccggagaatgtccatcaggcgctgatggcgaagttagcgtagcgtttatgccggatggtatgccatccggcgcgcatgaattacttctggcactgccgacaataaaacgttgcccgctgcgcatgtttagtcgccacaatcggcgtaccgcacacccgacacggctcaccttttcgcccgtaaacctgcaattcctgagcgaaatagcccggtttaccatcactttgcagaaaatctttcagcgttgtaccaccctgctcaatcgaacgcagcaacaccgctttaatcacccgagctaacaattcacactctgccagcgacagtgatgacgccagccgatccggatggatccccgccgcaaacagtgattcgctggcatagatattccctacccctaccaccagcttgttatccatcagccacggtttaatcgccgtttttttcttcgcgcacttctgatgcagatactcaccattgaaatcgtcgctaagcggctccggtccaagatgggtcagcacattatgcccttccagctctttggtccacagccaggcaccaaagcggcgcggatcggtgtagcgcagcactttgccgttgctcatcaccaaatccacatggtcatgcttttcagggggaagttcttctggaaggatgcgcaggctgccagacatccctaaatgaatgataatccagccctcaggcagctccagcagcagatatttagcccgccgctgcacgctaagcactggttggtcgcttaaacggtagatctcttctgaaaccggccagcgcaagcgtccgttgcgcaccactgcatgaagaatggttgcaccaacgagatgcggttctatgccgcggcggctggtttcaacttcgggtaattcaggcatagcatctccaggaatgaacagatgcagtcaatatgggggcaagcagataacaaaaaaccccgccggagcgaggttttttgttacatcaaagcgagaattatttgattttcgcttctttgtagatcacgtgctggcgaacaactggatcgaattttttcagttccagtttttccggcttagtacgtttgttcttcgtagtggtatagaagtgaccagtaccagcagaagaaaccagcttgattttctcacgaatacctttagccatgatttatttcctctaagtacttagtacttttcgccacgggcacgcagttcagccagaactgtatcgatgccttttttatcgattacacgcatacctttagcagatacgcgcagggtgacaaaacgcttctcgctctcaacccagaaacggtgagagtgcaggttcggcaggaaacggcgtttagtcgcgttcagtgcgtgggaacggttgttaccggtcaccggacgcttgccagtaacttggcagactcgggacatgtctattctccaaaaatcaaattagctcgagcttcgtatggggtattggcgcctcgtcaggctttacagcccggtcatcgcagttctatgtgaactctcgattgccaggcccaaatgccaaacccgagattctcaaaggtggcgtagtatacgctgactcagcgatgtgctcaagtcccgaacagacaaagatcccgaaggatcgcgcatagcgggttaaatccagccgcgttcggcaaaagaaacatactctccacgcccaatcacgatatggtcgagcacgcgtaaatccatgaactgacaactctttattatccgttcagtaatgagtttatccgctttactgggttcagcacaacccgaagggtgattatgtgcaaggatcagcgccgaggcgtttatttttatcgcttcgcggataatttcccgaggatggacttcaacatggtttagcgtgccggaaaaaagacgcctatgcgttataacccggtgttgggagtcgagaaagatcaccataaagatctcccgctcctcacccgtgagctggctttgtaaaaattccctcgtcatctccgggctgagtaaagggctttcttcacgcatccgcacgttgtagtaacgccgcgccagttcagcaatcccctttaactgggcaaatttcgccacgccaattccatgaacgccactaaattgttcatattcagaggttaacaagccataaagagagccgaaattctccagcatctcttttgccagggttaatacatctttaccgcgcgttccggtacgcagaaatagcgccagcagctcgacatccgttaaggcgctaataccaaacttcagcattttttcgcgcggcatcaacagctgtgaattgtttttcaccttcacctcctttgtggtgctcgcatcctgtcatagccgtttcgttaaatcgacggccagttttcaatcctggaaagcgcctcgcaaagtgaatctcaggtgaaggcacgacaacaaaagtattgtgataaaatcgccaacttctggtgtcaccctacaggaaaaatcatcatgagcctggccggtaaaaaaatcgttctcggcgttagcggcggtattgctgcctataaaacccctgaactggtgcgtcgtttgcgcgatcgcggggccgacgtccgcgtagccatgaccgaagcggcaaaagcctttatcaccccacttagcttgcaggcggtttctggttatcccgtttccgacagtctgctggacccggcagccgaagccgctatgggccatattgagctgggtaaatgggctgatttagtgattctcgcccctgccacggcagatttgattgcccgtgttgctgccggaatggcgaatgacctggtatcgacgatttgtctggctacacctgcgcctgtagccgtgctccccgccatgaaccagcagatgtaccgtgccgctgccacgcagcataatttagaggtgcttgcttcccgtggtttgctcatctgggggccagacagtggcagtcaggcttgtggtgatatcggtcctgggcgaatgctcgatccgttaaccattgtggatatggcggtagcgcatttttcgcccgtcaacgacctgaaacatctgaacattatgattaccgccggcccgacgcgtgaaccgctcgatccggtgcgttatatctctaatcacagctccggcaagatgggttttgctatcgccgccgccgctgcccgtcgtggcgcgaacgtcacgctggtatcaggtccggtttcactaccgacgccaccgtttgttaaacgtgttgatgtgatgaccgcgctggaaatggaagccgccgtgaatgcttctgtacagcagcaaaatatttttatcggctgcgccgccgtggcggattatcgcgcagctaccgtggccccagagaaaatcaaaaagcaggccacgcagggtgatgaattaacaataaaaatggttaaaaaccccgatatcgtcgcaggcgttgccgcactaaaagaccatcgaccctacgtcgttggatttgccgccgaaacaaataatgtggaagaatacgcccggcaaaaacgtatccgtaaaaaccttgatctgatctgcgcgaacgatgtttcccagccaactcaaggatttaacagcgacaacaacgcattacaccttttctggcaggacggagataaagtcttaccgcttgagcgcaaagagctccttggccaattattactcgacgagatcgtgacccgttatgatgaaaaaaatcgacgttaagattctggacccgcgcgttgggaaggaatttccgctcccgacttatgccacctctggctctgccggacttgacctgcgtgcctgtctcaacgacgccgtagaactggctccgggtgacactacgctggttccgaccgggctggcgattcatattgccgatccttcactggcggcaatgatgctgccgcgctccggattgggacataagcacggtatcgtgcttggtaacctggtaggattgatcgattctgactatcagggccagttgatgatttccgtgtggaaccgtggtcaggacagcttcaccattcaacctggcgaacgcatcgcccagatgatttttgttccggtagtacaggctgaatttaatctggtggaagatttcgacgccaccgaccgcggtgaaggcggctttggtcactctggtcgtcagtaacacatacgcatccgaataacgtcataacatagccgcaaacatttcgtttgcggtcatagcgtgggtgccgcctggcaagtgcttattttcaggggtattttgtaacatggcagaaaaacaaactgcgaaaaggaaccgtcgcgaggaaatacttcagtctctggcgctgatgctggaatccagcgatggaagccaacgtatcacgacggcaaaactggccgcctctgtcggcgtttccgaagcggcactgtatcgccacttccccagtaagacccgcatgttcgatagcctgattgagtttatcgaagatagcctgattactcgcatcaacctgattctgaaagatgagaaagacaccacagcgcgcctgcgtctgattgtgttgctgcttctcggttttggtgagcgtaatcctggcctgacccgcatcctcactggtcatgcgctaatgtttgaacaggatcgcctgcaagggcgcatcaaccagctgttcgagcgtattgaagcgcagctgcgccaggtattgcgtgaaaagagaatgcgtgagggtgaaggttacaccaccgatgaaaccctgctggcaagccagatcctggccttctgtgaaggtatgctgtcacgttttgtccgcagcgaatttaaataccgcccgacggatgattttgacgcccgctggccgctaattgcggcacagttgcagtaatatgacgccggatgacttttcatccggcgagtttctttaaacgccaaactcttcgcgataggccttaaccgccgccagatgttccgccatttccggcttctcttccaggtaagcaatcaggtctttcagggtgatgatagagatcactttgcagttgtaatcacgctcaacttcctgaatcgccgaaatctcgccgcgcccgcgttcctgacgatcgagcgaaatcaacacgccagcaagcgtcgcgccattggcctgaataatctccatcgactcgcgaatcgccgttccggcggtgatcacatcatctaccagcattacgcgtccttgtaacgcgctaccaaccagattgccgccttcaccgtggtcttttgcttctttgcggttaaagcagtacggcaggtccaggtcgtgatgctccgccagtgccacagcggttgtggtggcaatcgggatccctttgtaagcagggccaaacagcagatcgaactcaatgccggaatccaccaacgcttcagcgtaaaaacggcctaacagtgccagatcgcgcccggtattaaacagcccggcgttgaagaaataggggcttttgcgcccggatttcagcgtaaactcgccaaactttaacacctgcttgctaagcgcaaattcaataaactggcgctgatatggtttcatgccttcgctcctcatcttacttttctacagacaaaaaaaaggcgactcatcagtcgccttaaaaatcagtttgccagcgccgccttctgcgtcgctacaatggattcgattccccctcgggccagagccaacaaggtgagtagctcttcatgggtgaacggctcgccttctgccgtcccctgcacttcaatgatgcgcccgtcttcggtcatcactacgttcatgtcggtctctgcggcagagtcttcaacgtattccagatcgcaaaccgcttcgccgttcacaattccgacagaaactgcggctaccatccctttcatcggattggttttcagcttgccgttttccaccagcttctgtagcgcatctaccagcgccacgcaggcacccgtaatcgacgcggtacgcgtgccaccatcagcctgaagcacgtcgcagtccagcgtaatggtgaactcacccagcgctttcaaatctactgccgcgcgaagagcacgggcgatcagacgctggatttccattgtgcgtccaccctgcttacctttcgccgcttcacgagcgttacgggtgtgggtagaacgtggcagcatgccgtactctgcggtgatccagccctggccctgacctttcaggaagcgcggcacgccttcttcaatagaggcggtacacaacactttggtatcgccaaattcgaccagcaccgagccttctgcatgttttgtatagttacgagtcagggtaacgggacgcacctgattattgctacggcctgctggacgcatattgaaatctccggcttgaaacaaatgtggctgcgcattatacggacttccggcggttattcctatcctgacaaggcatcgatggctataatccttccacctctccttttataaacaggaacgtctatgatccgcagtatgaccgcctacgcccggcgtgaaatcaagggtgaatgggggagcgcaacctgggaaatgcgctcggtaaaccagcgttatctggaaacttactttcgtctgccggagcagttccgtagccttgaacctgtcgttcgcgagcgtattcgttctcgcctgacgcgcggtaaagtggaatgtaccctgcgctatgagccagatgttagcgcgcaaggtgagctgatcctcaacgaaaaactggctaaacagctggtaactgccgcgaactgggtaaaaatgcagagtgacgaaggggaaatcaacccggttgatattctacgctggccgggcgtgatggcagcccaggagcaggatcttgacgccattgccgctgaaattctcgcggcgctggatggtacgctggacgactttattgtcgcgcgcgaaaccgaaggtcaggcactgaaagcattgatcgagcagcgtctggaaggcgtcaccgccgaagtggtcaaagtccgctcccatatgccggaaatcctgcaatggcagcgtgagcgtctggtcgcgaagctggaagatgctcaggtgcaactggaaaacaaccgtctggagcaggaactggttctgctggcacaacgaattgacgttgccgaagaactggatcgcctcgaagcgcatgtcaaagagacctacaacattctgaagaaaaaagaagcggttggtcgtcgtctggattttatgatgcaggagttcaaccgcgagtcgaacactcttgcgtcgaagtctatcaatgccgaagtgacaaactccgccatcgagctgaaagtgttgattgagcagatgcgcgagcagattcagaacatcgaataactcgtaacgccaattcttacttttccgccttcacaaatgccgccactcaaacagagcggcatttttcttccccgcaacattcaattctgttttgcgtgcctgctccagattttgcgatgtttttttgcccagcacactgagaacgtgagatactcacaactgtatataaatacagttacagatttactttctttgcaattgatatcacatggagtgggcaatgaacgaacatcatcaaccttttgaagagataaaactgattaatgcaaacggagcagaacaatggtcagcaagacaacttgggaaactactgggttattcagagtatcgtcactttatacctgtattaacgcgcgccaaagaagcctgtgagaacagtggtcacacaattgatgaccatttcgaggagatcctcgatatggtcaaaattggctcaaatgccaaaagagcattaaaagacatcgtactctcccgctatgcctgttacctggtagtacaaaacggcgaccctgcgaaaccggtcattgcggcagggcagacttattttgctatccagacccgacggcaggagcttgctgacgatgaagcatttaagcaacttcgtgaagacgaaaagcgtctgtttctgagaaatgagttgaaagaacataacaaacaattggttgaggcagcacagcaagctggggtagcgacagctactgatttcgccatatttcagaatcatggttaccaggggctgtatggtggattagatcagaaagctattcatcagcggaaggggctgaaaaagaatcagaagatcctggatcatatgggttcaacagaactggcggctaatctctttcgagctacccaaacagaagaaaaactcaagcgggatggcgtgaattcaaaacagcaagcaaacaccacacactttgacgtgggtcgcaaggtgaggcaaaccattcaggaacttggcggaaccatgcctgaggagttgccgaccccgcaggtcagcatcaagcagttggaaaacagtgtaaaaattacagagaagaaatagcagaaactaaaaactctttttgttgattgagacacccgatgcgtaagccaaggtccaggtgcagtgaacacaatggctaaatattgcacctttcttttcccccctcagttttaacctattttttcttatgcattttctcagacaagaagtcagaagaatgcatctctgctacagaaaatagcgatttcacataactacaagttatcaatttcccctccccttaaaaaatctcaatcgtgacaatgcgcacaaatcgctaccctgccagacagatttttagggagagaaccatgctgttacacattttgtatttggttggcattactgccgaagccatgacgggggcgctggcggccggacgacggcgcatggatacatttggcgtaattattattgcgaccgccaccgcaattggcggagggtcagtgcgcgatattctgctgggccactatccgctcggctgggtcaaacacccggaatatgtgattatcgtcgctaccgccgcagtactcaccactatcgttgctcctgtaatgccttacctgcgcaaagtgtttctggtgctcgatgcgctcggactggtggtcttttctatcatcggggcacaggttgcactggatatggggcacggcccaattattgccgttgtcgcggcggtaaccaccggcgtgtttggcggcgttttgcgcgatatgttctgtaaacgtatcccactggtattccagaaagagttgtatgccggtgtctcatttgcctccgccgtgctgtacatcgcgctgcaacactatgtttctaaccatgatgtggtaattatctccaccctggtattcggcttttttgcccgcttactggcgctacgccttaagctgggattaccggtcttttactacagccacgaaggacactaaggttcaaaacctgtgatctgctgggcagccagccaactgcccagcttcttgatttgcgcattttccttccattcaataacctgtctggcgcgtcccgatccagtccccggcagctgctgccagaactgctccgtgctaaataaaagttgcgaccaggaccgttcatcactggcattaagcgccgcccgggttagcggtattcccattgccatcacccagcgagtaaaaggctgcttacgagccagattaaactgatgccatagctgcgcacttttacttttcgcgatccccggcgtgttctgtaattgctctggcgttaataaaagccaggaaaagatatgttcaaagcgatgagtctgatgcagcgcgcgccaaccggcctcaccaatgccatccagcccaagaacctgttttgcccccagccagactaagcgtgaaatgaactgttcctgacaaacatcagaagcaaagtagcaggtcaacgagttaaagcggttttctggcggtgtcggttttgtacgttctgcaccgcgccacaccacatcatcaatgcgaggaataccctgaccggcaaggctgacgagaatctgatcaccaggcgcaatatcccactcctgccagcgcctgacggaaccaatattcacccgctggacttttttatcatccagcatgacaggtgcgagtgacgcaaccaccgatattttaccgctcttacccaccgcaaactgaattgccttcacttcggcaacctgagctacaggttgatatttccaggccaccagccactctgcctggcccggtagccaatggcgggattctggctctttcgccgctcgtacaactacgccatcggtgacgaagggtaattccgctttccaccactcattgcgtacgcgcgcaacttcatcagcatttttcaccgcacgggtatacgtctgcgttagagtaaaacctgcggtagccagctcttttaaacgatcagacattaactgcggtccatccggccatgcccagacaaaaacgcccagagaattcagcgtgtcgctatcgtcctggcgcatcatcaagccagcaacttttgcgcgggcatttattccccccatttgttgttggatatgcccctcgcgctggagaaatatttccccctgaagcgtactgttggctaaaggcccgctaacggtttgcggcacagcggaaattaagctaactttctgcgtccagtcctcgcctttcaggccattaccgcgactgattgctttgttcagtttcccgtcccgataaaccagggttaccgcaacgccatcaacttttggctgcacccaaagatcgctacgttctcgcatccacagacttaatgcgtttttatccaccattttgcgtacacccgtatgggcaaccggatgcataaccgcaccatttaaaggcggcatcatcacgtcgcggggctcgctcccaaagcagcgttgccactgcgtaagacgggcgcttaactgatcgtaaacaccgtcttccacctcactttttccttccttccagtagtcatcgtcccactgttttatttgctgttgcaggcgggaaatttcttcctgtgctctggctggcgaccaggccggacagaccgcccacacagatgattgccagcacaagatacctattaatatcgccatccatactttcatcatcacctccgctgtagatagtcaggcagatatacaacgtgatgaaagcaaagccgagtggcaaaaacggagtctgcgaggacgcttcctgaaaatcgtctttattgcagtgaatgacaggcaaatgcggaagcagctacgcaaaacgcaacaactttgcgcaaaaagtgtgagcaagggctacgtcacatggccgcgccgtgtataataagctcgtatgtaggctttatttcgctaatcacatacgaaagatactcatggctcaaggcacgctttatattgtttctgcccccagtggcgcgggtaaatccagcctgattcaggctttattaaaaacccaaccgttgtatgacacccaggtttctgtttcacacaccacacgccaaccgcgtcctggtgaagtccacggtgaacattatttctttgttaatcatgatgaatttaaagaaatgattagcagagatgcgttcctcgaacacgcagaagtttttggtaattactatggcacttcgcgtgaggccattgagcaagtactggcgaccggtgtcgatgtttttctcgatatcgactggcagggcgcgcagcaaattcgccagaagatgccgcacgcgcggagtatctttattttaccgccgtccaaaattgaactggaccgccgtctacgcggtcgcggtcaggacagcgaagaggtcattgcaaagcgtatggcgcaagctgttgcagaaatgagccattacgccgaatatgattatctgattgtgaatgatgacttcgataccgcgttgaccgatttgaagaccattattcgcgccgaacgtctgcgcatgagccgccaaaagcagcgtcatgacgctttaatcagcaaattgttggcagactgaacctgatttcagtatcatgcccagtcatttcttcacctgtggagctttttaagtatggcacgcgtaactgttcaggacgctgtagagaaaattggtaaccgttttgacctggtactggtcgccgcgcgtcgcgctcgtcagatgcaggtaggcggaaaggatccgctggtaccggaagaaaacgataaaaccactgtaatcgcgctgcgcgaaatcgaagaaggtctgatcaacaaccagatcctcgacgttcgcgaacgccaggaacagcaagagcaggaagccgctgaattacaagccgttaccgctattgctgaaggtcgtcgttaatcacaaagcgggtcgcccttgtatctgtttgaaagcctgaatcaactgattcaaacctacctgccggaagaccaaatcaagcgtctgcggcaggcgtatctcgttgcacgtgatgctcacgaggggcaaacacgttcaagcggtgaaccctatatcacgcacccggtagcggttgcctgcattctggccgagatgaaactcgactatgaaacgctgatggcggcgctgctgcatgacgtgattgaagatactcccgccacctaccaggatatggaacagctttttggtaaaagcgtcgccgagctggtagagggggtgtcgaaacttgataaactcaagttccgcgataagaaagaggcgcaggccgaaaactttcgcaagatgattatggcgatggtgcaggatatccgcgtcatcctcatcaaacttgccgaccgtacccacaacatgcgcacgctgggctcacttcgcccggacaaacgtcgccgcatcgcccgtgaaactctcgaaatttatagcccgctggcgcaccgtttaggtatccaccacattaaaaccgaactcgaagagctgggttttgaggcgctgtatcccaaccgttatcgcgtaatcaaagaagtggtgaaagccgcgcgcggcaaccgtaaagagatgatccagaagattctttctgaaatcgaagggcgtttgcaggaagcgggaataccgtgccgcgtcagtggtcgcgagaagcatctttattcgatttactgcaaaatggtgctcaaagagcagcgttttcactcgatcatggacatctacgctttccgcgtgatcgtcaatgattctgacacctgttatcgcgtgctgggccagatgcacagcctgtacaagccgcgtccgggccgcgtgaaagactatatcgccattccaaaagcgaacggctatcagtctttgcacacctcgatgatcggcccgcacggtgtgccggttgaggtccagatccgtaccgaagatatggaccagatggcggagatgggtgttgccgcgcactgggcttataaagagcacggcgaaaccagtactaccgcacaaatccgcgcccagcgctggatgcaaagcctgctggagctgcaacagagcgccggtagttcgtttgaatttatcgagagcgttaaatccgatctcttcccggatgagatttacgttttcacaccggaagggcgcattgtcgagctgcctgccggtgcaacgcccgtcgacttcgcttatgcagtgcataccgatatcggtcatgcctgcgtgggcgcacgcgttgaccgccagccttacccgctgtcgcagccgcttaccagcggtcaaaccgttgaaatcattaccgctccgggcgctcgcccgaatgccgcttggctgaactttgtcgttagctcgaaagcgcgcgccaaaattcgtcagttgctgaaaaacctcaagcgtgatgattctgtaagcctgggccgtcgtctgctcaaccatgctttgggtggtagccgtaagctgaatgaaatcccgcaggaaaatattcagcgcgagctggatcgcatgaagctggcaacgcttgacgatctgctggcagaaatcggacttggtaacgcaatgagcgtggtggtcgcgaaaaatctgcaacatggggacgcctccattccaccggcaacccaaagccacggacatctgcccattaaaggtgccgatggcgtgctgatcacctttgcgaaatgctgccgccctattcctggcgacccgattatcgcccacgtcagccccggtaaaggtctggtgatccaccatgaatcctgccgtaatatccgtggctaccagaaagagccagagaagtttatggctgtggaatgggataaagagacggcgcaggagttcatcaccgaaatcaaggtggagatgttcaatcatcagggtgcgctggcaaacctgacggcggcaattaacaccacgacttcgaatattcaaagtttgaatacggaagagaaagatggtcgcgtctacagcgcctttattcgtctgaccgctcgtgaccgtgtgcatctggcgaatatcatgcgcaaaatccgcgtgatgccagacgtgattaaagtcacccgaaaccgaaattaatgttttatgaacccaacacgttatgcacgcatctgcgaaatgctcgccaggcggcagcctgatctgaccgtctgcatggagcaggtccacaaacctcataacgtttctgcgattattcgtaccgcagatgccgttggcgtacatgaagttcacgccgtctggcctggtagccgcatgcgcaccatggcttcggcagcggcgggtagtaacagctgggtacaggtgaaaatacaccgcaccattggcgatgccgtcgctcatctcaaaggccagggcatgcagattctggcaacccatctttctgataacgctgtcgatttccgcgaaattgattacactcgcccgacctgcattttgatgggacaggagaaaacgggcatcacgcaggaagcattggccctggcggatcaggacatcatcattccgatgatcggcatggtgcagtcgctgaatgtttccgttgcctcagccctcattctttacgaagcccagcgtcagcggcaaaatgcaggcatgtacctgcgtgaaaacagcatgttgccggaagcagagcaacaacgcctgttgtttgaaggcggctatccggtgctggcgaaagtcgcaaaacgcaaaggcctgccttatccccacgtcaatcagcaaggcgagatcgaagctgatgccgactggtgggctactatgcaggctgcagggtaagtgccatgaaaggtcgcctgttagatgctgtcccactcagttccctaacgggcgttggcgcagcacttagtaacaaactggcgaaaatcaacctgcataccgtgcaggatctactcttacaccttcccctgcgctacgaagatcgcacccatctctaccccatcggagaactactgccgggcgtttatgccacggtggaaggcgaagtgctgaactgcaatatctccttcggcggtcggcggatgatgacctgccagatcagcgacggttccggcatcctcaccatgcgctttttcaatttcagcgcggcaatgaaaaatagcctggcggcgggccgccgtgtactggcttatggcgaagcaaagcgcggtaaatatggtgcggagatgatccacccggaataccgcgtgcagggcgatctcagcacgccagaattacaggaaacgctcacgccggtttatccaacaacggaaggcgtaaagcaggccacgctgcgtaaattaaccgaccaggcgctggatctgctcgacacctgcgccattgaagaactcctgccgccggaactgtcacaaggaatgatgacgctaccggaagcgttgcgcactttgcaccgcccgccaccgacgctacagcttagcgatctggaaaccgggcagcatccggcgcaacgtcgtctgattctggaagaactgctggcgcacaacctcagcatgttagccttacgtgccggagcacagcgttttcatgcccagccgctgagcgccaatgacacgctgaaaaataaactcctcgccgccttaccgttcaagccaacgggcgcacaggcacgcgtagtggcggagatcgagcgcgatatggcgctggatgtgccgatgatgcgtctggtgcagggcgatgtaggttccggtaaaacgctggtcgccgccctcgccgcgttgcgtgcgattgcccacggcaaacaggtagcattgatggcaccaaccgaattactcgccgagcagcacgccaataacttccgcaactggtttgcaccgctcggtatcgaagtgggctggctcgccggtaagcagaaaggtaaagcacggctggcacagcaggaagccatcgccagcggtcaggtgcagatgattgtcggtacacacgccatcttccaggaacaggtgcagtttaacggcctggcgctggtgattatcgacgaacagcatcgttttggcgtgcatcagcgtctggcattgtgggagaaaggccagcagcagggcttccatccgcatcagttgatcatgaccgccacgccgatcccccgcacgctggcaatgactgcgtatgccgatctcgatacctcggtgatagatgagctgccgccaggccgcacgccagtgactacggtcgctattcctgatacccgccgtaccgacatcattgaccgcgtgcaccacgcctgcataactgaaggtcgtcaggcatactgggtttgtacgttgattgaagagtcggaattgctggaagcgcaggcggcggaagctacctgggaagagttgaaactggcgctaccagagttgaacgttggcctggtacacgggcggatgaaacctgccgagaaacaggcggtgatggcgtcgtttaaacaaggtgagctacacctgctggttgccacaaccgttattgaagtcggcgttgatgtgcctaacgccagtctgatgattatcgaaaacccggagcgtctgggtctggcgcagttacaccagctgcgcgggcgcgtaggtcgtggcgcggtggcttctcactgcgtgctgctctacaaaacgccgctttctaaaacggcgcaaattcgcctgcaagtgctacgcgacagtaacgacggttttgtgattgcgcaaaaagatctggagattcgcggccctggcgaattgttaggcacgcgtcagacgggtaatgctgaatttaaagtggcggatttactgcgcgatcaggcgatgatcccggaagttcagcgcctggcacgccatattcacgaacgttacccacaacaggcaaaagccctgatagaacgctggatgccggagacggaacgttactcgaatgcgtaaaaggcggcagtgagaagaccgccatttcaggttaccctaccttcctgccggatgcgattcatcaccctacaaattcaataaattatgaatcaatacgcaggcttgataagcgaagcgtatcaggcatttgtctttgttgcggcggcacttctaccgccgcttcatcggttaaccggcaaaaatcggcaacatcaaatacaacttaattaccagcgcattgacgatatcgataaagaacgcaccgaccatcggcaccaccaaaaacgccatgtgcgacgggccaaagcgttcagtgatcgcctgcatgttggcgattgccgttggcgttgcaccgaggccaaaaccacagtgacccgcagccagcactgccgcatcgtagtttttgcccatcatgcgccaggtaacgaagatggcatacaacgccatgaagatggtctgtaccaccagaatcgccagcatcggcagcgccagcgaagccagctcccacagtttcagccccatcaacgccatcgccaggaacaacgacaagcttacgttacccagcacggataccgcacgctcaaagacgcggtaaaagcccattattgacagaccgttgctcagaatcacgccaacaaacagtacacagacgaaggtcggcagttcaaaagcagtgccagccaaaagttgcgcaacaattttccccaccgtcaggcagatagcaatcagcgcgatagtttcaatcagcaccaacgaggtgatcatgcgtcccacatccggcttttcaaacgccgtcgggacttcctggtcatccggaataccgttcggcgtggtggagtgtttcaccagatagcgcgccaccggaccgccaatcaagccgcccagcaccagaccgaacgttgcacaggccatcgccacttccgtcgcattggtgaagccataacgttcaatgaacaatttactccacgcagcgcccgtaccgtgaccgccggaaagcgtaatagaaccggccaacagccccatcagcggatcaagccctaacaagctagccataccaatgccaatggcattttgcatcaccaacagaccaacaaccacaatcaagaagatgccaaccacacgcccaccggcacgcaaactggcaatgttggcgttcaggccaatggtggcgaagaaagccagcattaacggatcgcgcagggacatatcaaagttgacttcccagcccatgctttttttcagtactagtagcgccagcgccaccaacaaaccacccgcaacaggttccggtatggtgtatttcttcaaaaaggagacggaatggaccaacttacgcccgagcagcaacgtcagcgttgcggcaacaagcgttgctaaagtatcgagatgaaacatagttactcctttgtatccgcatcactctttcatactcgtcatacttcatcgcgcagtggcaacttcatgaactatgacgggtatcgagttatgctttcctgggtcaaattctcagctgttaatgaacaaatggcatggattttaagcagaaaaataccaaaagttatataaaaaagtgcatttatctcatttaaatatttagatgaggatgtggcaaacgtttgcttttctctttcggtcagctaaaatgcccgctttgctaccacgggattgttttcgatgtctgtttccaccctcgagtcagaaaatgcgcaaccggttgcgcagactcaaaacagcgaactgatttaccgtcttgaagatcgtccgccgcttcctcaaaccctgtttgccgcctgtcagcatctgctggcgatgttcgttgcggtgatcacgccagcgctattaatctgccaggcgctgggtttaccggcacaagacacgcaacacattattagtatgtcgctgtttgcctccggtgtggcatcgattattcaaattaaggcctggggtccggttggctccgggctgttgtctattcagggcaccagcttcaactttgttgccccgctgattatgggcggtaccgcgctgaaaaccggtggtgctgatgttcctaccatgatggcggctttgttcggcacgttgatgctggcaagttgcaccgagatggtgatctcccgcgttctgcatctggcgcgccgcattattacgccgctggtttctggcgttgtggtgatgattatcggcctgtcgctaattcaggttgggttaacgtccattggcggcggttacgcagccatgagcgataacaccttcggcgcaccgaaaaatctgctgctggcaggcgtggtcttagccttaattatcctgcttaaccgtcaacgtaacccttacttacgcgtggcctcactggtaattgcgatggcggccggatatgcgctggcgtggtttatgggcatgttgccagaaagcaacgaacctatgacgcaagaactgattatggtgccaacgccgctctattacggtcttggcattgaatggagtctgctgctgccgctgatgctggtctttatgatcacttcgctggaaaccattggcgatatcacggcgacctctgacgtttccgaacagccagtgtccggtccgctgtacatgaaacgcctgaaaggcggcgtgctggcaaacggcctgaactcgtttgtttcggcggtgtttaacaccttcccgaactcctgcttcgggcaaaacaacggagtgatccagttgactggtgttgccagccgctatgtcggttttgtcgtcgcgctgatgttgatcgtgctgggtctgttcccggcagtgagcggttttgtacaacacattccagaaccggttctgggcggcgcaacgcttgtaatgtttggcaccatcgccgcctccggtgtgcgtatcgtttctcgtgagccgctgaaccgtcgggcgattctgattatcgcgctgtcgctggcggttggtctgggcgtgtctcagcagccgctgattttgcagtttgcccctgaatggctgaaaaacctgctctcctccgggatcgccgcgggcggtattactgccatcgtgctgaatctgattttcccaccagaaaaacagtaattcactggcggcggtaagataattaccgccgcagtctcacctctttaaccattcccgccttgaggattgcgcgtaaatcgtgcataactcccttatgtgcatttcacgggatggaagaccatgaaatttattgggaagctgcttctctacattctcatcgctctgttagtggcgatcgctggcctctattttcttctgcaaacccgctggggagcagaacatatcagcgcatgggtttccgagaatagcgactatcatctggccttcggggcgatggatcaccgtttttccgcgccatctcatatcgtgctggagaacgtcacgtttggtcgtgatggccagcccgcgaccctggtggccaaaagtgtcgacattgcgctaagcagtcggcaactgaccgaaccacgccatgtcgataccatcctgctggaaaacgggacgctgaatctcaccgaccagaccgcgccgctaccgttcaaagccgatcgtctgcaactgcgtgatatggcgtttaatagcccgaatagcgaatggaaactgagcgcgcagcgggtaaatggcggcgtagttccgtggtcaccaaaagccggtaaagtgctgggtacgaaggcgcagattcagtttagtgccggatcgctttcgctcaatgatgttcctgccaccaatgtactgattgaaggcagtattgataacgatcgcgttacgctgactaacctgggtgccgacatcgcccgcgggacattaaccggaaacgcgcagcgtaacgccgacggcagctggcaagtggaaaacctgcgcatggcggatatacgtctacaaagcgaaaaatcgctaaccgacttctttgcgccattacgctctgtcccgtcgttgcagattggtcgcctggaagtgatcgatgctcgtttgcaaggtccggactgggcggtgaccgacctcgatctcagcttgcgcaacatgaccttcagtaaagatgactggcagacacaggaaggcaaactgtcgatgaacgctagcgagttcatttatggttcgctgcatttatttgacccgattataaacacggaattttccccgcagggcgtagcgctgcgccagttcaccagccgctgggaagggggtatggtcagaacgtcagggaactggctgcgtgacgggaaaacgttgatccttgatgatgcggcaattgccgggctggaatataccttgccgaaaaactggcaacagttgtggatggaaacgacacccggttggttaaacagcctgcaactgaagagatttagcgccagccgcaatctgatcattgatatcgaccctgacttcccgtggcagctcaccgcgctcgatggttacggtgccaacctgacgctggttaccgatcataaatggggcgtctggagtggctcggcgaatctgaatgccgccgccgcgacattcaatcgtgttgatgttcgtcgcccgtcgctggcgctgaccgccaacagcagcacggtgaatatcagcgaactgagtgcatttactgaaaaaggcattctggaagccaccgccagtgtttcacaaacgccacaacgtcagacacatatcagcctgaatggacgcggtgtgccggtgaatattttgcaacagtggggatggcctgaattaccgttgactggcgacggcaatattcagcttaccgccagtggcgatattcaggccaatgtcccgttgaaacctacggttagcgggcaattgcatgccgtgaacgccgcaaagcagcaagtgactcaaaccatgaatgctggcatcgtttccagcggtgaagttacatcgacggagccggtgcggtaaacatcaatctcgccgggtacgactcagacgtacccggcattccatcaatagattacaacgtaattgtcagcgcattcccttgaggcttcaccaccagcccctgctcactttcagcctgcgaaccgtcttgcagaccatttactttcacaacattgcgcaggcacagtgtccagttcttcgcctcgcccgcaccagtcacagtaatcgtgttgccagtacgtgctgcttttaaagtaaagatcaccgatccgtcagcagcgggcacttcacagacggcttcatgcccgtcttgcagattaaagaggtggaatgccgtgccttcgtgccacacgtaatcgggacgttgatcgttgttgcccagcgccagtagagtgttatcacgcacataaacgggcagactcaggaagccgtgctgctgtttatgccagcgactaccgtcgagttcatcgttgtgccacaggtgtgtccagcgaccttccggcaggtagaactgcacatcgcccgcttcagtgaacaccggcgcaaccatcacgttgtcgcctaacatgtattgacggtcaaggtaatcacaagccggatcgtccgggaactccatcatcatggcccgcatcatcggcgtaccccgcgcgttcgcacgcgcagcttcacgatacagatacggcatcatgcggcatttcagttgcgtgaagaagcgcaccacatcacaggactcatcatcgtaggcccacggcacacgataagatttgctaccgtgtaaacggctatggctggagagcaaaccaaacgcgcaccagcgtttgtaaacgtgcgccggagcggtattttcaaagccgccgatatcgtggctccagaagccaaaacctgaaaggccaatagacaaaccaccgcgcaggctttccgccattgattcgtagttagcgtaacaatcgccaccccagtgtaccgggaatttctgcgcaccgacggaggccgagcgggcaaacaagacagcttcttcctcaccaacggtgtccttgagcacgttccacaccagttcgttgtagatgtacgcataatggttatgcattttctgcggatcggaaccgtcaaaccactgaacatcagttgggatacgttcgccaaagtcggtcttaaagcaatcaacgcccatcgcgaccagacctttcagtttgtcggcgtaccatttgcaggcatccggattggtaaagtcataaatcgccagacctggctgccatttatcccactgccatagcgaaccgtccgggcgtttgagtaaatagcctttctcttgtaactctttaaagacgggggatttttgaccgatataggggttaatccagacgcagattttcagtcctttcgctttcaggcggcggatcatcccttccgggtcagggaaagtcagcgggtcccactcaaaatcgcaccactggaaggctttcatccagaaacagtcaaagtggaaaacatgcagcggcagattgcgttccgccataccatcgataaagctgtttaccgtcgcttcgtcgtagttggtggtaaatgaagtggttagccacaggccgaaggaccacgcgggcggcagcgccggacgaccagtaaagcgggtataacgatcaagtaccgctttcggcgtcgggccgtcgataacaaagtattcgagatattcactctcaacgctgaactgcactttggagactttctccgatcccacttcaaaagagacacactggggatgattgaccagtaccccataaccacggttagtcatgtagaacgggatatttttatacgcctgttcagtacttgtgccgccgtcccggttccaggtctctaccgtctggccattgcgcaccagggcagtaaagcgctctcccagaccgtaaactgtttcgccaacgccaagatcaagccgctcaaacatataattgcgttgattattcgtgtcctgcacgtagccattatttttcacctgactaccggtaatacgttcgccgttgcgcagaaaatccagtgaccagaactcacctttgctgacacgcgcgcttaagttgccacttttaaactcagcataacgttctgtgttttcgattgtgaccttcacgtcctgcaaaatattgagcggataatgaggaccgttattcagcgccccctgaaaatgctcaatccgcacaccgacaataccttcctgtggggagaaaaagcgcaacgtaaataaaggcgtatcaagctgccaggtacgttcacgcacatcacggggggcagcatagaccaccatttcattatcctgctgttcaacctcgaacacctgaagcgggtgaatcaaattgaggccaggttgaatcaaccagtttccatcgctaattttcattgccgttccttagttctgcacttcttgagaggtgaattgttgctggcaacggcgtttaccctgagccagctgttccataacggttttcagattgtgcgtcgtgagtgagtagtagcgtttagcgataatcgcgctcagcaaataacagatcgccggaacaatcgtgaatagcgcaataatgatgctaatcgtggcgctgttctgcgctttttctgccgcatcatatccgccataagccagcatccagccgataagagcgccgccgaaggccaaccccagtttgagcacaaacagcgtgccagcaaaactgatcccggtcaggcgtttaccattgcaccactcgccgtagtcgacggtatcggacatcattacccactggataggtgtcaccagttgatgcaacacaccaatcacgaagatgaagacaaacatagtgatgctggcctgcatgggaacaaagaacatcgcgaggctaatcactgccagcagggcgttcgtccaccagaagatagtgactttacatttccagtcggtcagaggttttgccagtgcggaaccaatcaggttacccacgcaataagtggtgagaaaagcgacaaacacttccggcgtgcccaaaatccatgtgacgtaatacatcatcgccccaccgcgtacgcacaccgccaggatattgaaaatggttagtaaaccgacaatccgccactggtcgttttgccagatatcacgtaaatcttcccgcatagacgttgttgtaggtggtgcttcaacgcgttctttagtggtgaagaaacaaaatgccagcatcatgaatgccaccacggaaaggaccgcgataccgccctggaaaccgagtggtttattatcaccgccaattaaattaaccagtggcatcatcagaacagtagaaagcatgcctcccgcggtcgccagcacaaaacgccaggattgcagcgagatacgctgagtcgggtcattggtgattacaccacccaatgcgcagtaagggatattgacgacggtataaagtaaggtaagtagggtgtaagtaattgctgcatagatcattttgccgttcatactgagatctggcgtgctataggccagtacacagacgatcccgaatggcagtgcgccaaacagtacccacggacgaaatttaccccagcgagagcgcgttcgatcggccaacaaccccatgcaaggatcggaaatcgcatccagtgcacgagcgaccaaaaacatggttccgacaaaaccggcaggaatgccaaaaatatcggtataaaagaacatcatatataacattacgttatcgaaaataatgtggctggcggcgtctcccatgccataaccaattttctctttaacggacaacacttcactcttcatctgcttttccttgatgctataggggtgcagagaccgataacgcattttgtaaaccatccctgtgagagcgaatattccgatatctggttattaatttatgattcttgttttatgtgatcgtggtagcgttaattccgctcatatatcattgtaaaatatgggttttatatgaactataatgctttcgtgataatacgctgcgtgtattaggcggaaaaaactgatctgggggatgtagaaactcaaggaagtagctataatgcgccccgcctccatgtagcaatcgaggcgcggaagatcgtcgtctccggtgaggcggctggacttcaaatccagttggggccgccagcggtcccgggcaggttcgactcctgtgatcttccgccaaaatgcctctcctgacgttctccaaccccttgtaatactgtcaatccagatattttctactgctcaatattcaatcggcttcaggaatacctggtctaaggttttgtgatggacgatgagcggctgaagaatccgcctgtcggttcttctgtcctcgaacgcatccgcgatattcacgccagtatgcgccgtgtttatttgcaggtgatttgcccccctgctgactctcagccaactgtatcgccattaaggtgaagatgttgttttactcgccccagaacacccttttttatacgactattctatttctttaaccgctggcgaaaaaaactgactataaacttcaccaataatcagactgccatcaagattaatttgttcatttaatatatcaaatcaacttgttttatttttactatcaaaaatagctcattgccttactataattaatatataaattcggtaattaattcttaacatgcttttactaataatctcaattgctggccctataatattgcgctagcattgctttctggttgtatcagcgatactcaaaaattcttaatacaatactcattcgactggtacttatttgtaactcagttatattttttcgcccggtgattcagaagaatgcaaaaaacggctaccactccatcaaaaatacttgatctcactgccgcggcatttttacttgtcgcctttctgacgggtattgcgggcgctcttcagactcctaccctaagtatattcctcgcagatgaactgaaagcccgtcctataatggtaggttttttcttcaccggtagcgctattatgggaattctggtcagtcaatttctggcaaggcactccgataaacaaggcgaccgtaaattactgattctgctatgttgcttatttggagtgctggcctgcacgctttttgcgtggaatcgcaactacttcattctcctctcaacgggcgtacttctgagtagttttgcttccaccgcaaacccgcaaatgttcgccctcgcccgtgaacacgccgacagaacaggccgtgagacggtcatgttcagtacatttttacgtgctcagatctcgcttgcctgggttatcgggccaccgctcgcttatgaactggcaatgggatttagttttaaagtgatgtatctcaccgctgccatcgcatttgttgtttgcggactgatagtctggttgtttttgccatcaatacaaagaaatattcctgtcgttacccaacccgtagaaattttaccctccacccacaggaagcgggatacgcggctactttttgtggtctgttcaatgatgtgggcggcgaataatctctacatgataaatatgccgctatttattattgatgaactgcatctaaccgataaactggctggagaaatgattggtatcgctgccggtctggaaattccgatgatgttaatcgcaggctattacatgaaacgtattggcaagcgactattaatgctcattgctatcgtgagtggaatgtgtttttacgccagcgtactcatggcgacgactccggcggttgagctggaattgcaaattcttaatgccatcttccttggtattctctgtggtatcggcatgctttattttcaggacttgatgcctgaaaaaataggctctgcgacaacgttatatgcaaatacttcacgcgtcggctggattatcgccggctctgttgacggaattatggttgaaatctggagctaccatgcgttgttctggctggcgatagggatgttgggtattgcgatgatttgcctgctgtttattaaagatatttagctcaccagtctgggctaagaaaaatcggcgtggcgcaaacagagccatcctcgccatttttgctatcatgcctgcatacataaacgacaaaacagtatgcagagggaaaaatgggttccaccagaaaggggatgctgaacgttctgattgccgccgtgttgtggggaagttcaggggtctgcgcgcaatacatcatggagcaaagccagatgtcgtcgcagtttttgactatgacgcgtttgatattcgccggtttgattctactgacgctgtcatttgttcatggcgataaaatcttttctattattaacaatcataaagatgccattagcctgctgattttttccgtggttggcgcgctaactgtacagctcacttttttgctaaccatcgaaaaatcgaacgcagccacggcaacggtgctgcaattcctctcaccgacgattatcgtcgcctggttctcactggtgcgtaaatcgcgcccgggcattctggttttctgcgctattttgacatcgctggtcgggacttttttattggtgacacacggtaatccgacgtcattatcgatctctcctgccgcgttgttctggggcattgcctcggcatttgctgctgcattctataccacctatccctcaacgctaattgcccgctatggcacgttaccagtcgtcggctggagtatgctgattggcggtctgattctgttgcctttttatgccagacaaggaacaaactttgtcgttaacggcagtttgattctggcgtttttttatttggtggtcattggtacgtccctgacatttagtctgtacctgaaaggagcacaattaattggcggtccaaaagccagcattttgagctgtgcagaaccattaagtagcgcgctactctctttgctgttgctggggatcacgttcacattaccggactggctgggaacgctgctgattctgtcatcggtgattttgatttcaatggattcccgtcgccgcgccagaaaaataaatcgtccggcgcggcataagtgagaattaccagccaggcaccgcgccaccgttaaaaatggtttctgccgctttagcgacttcgggtgattgataagattgcagaaattccttcacgttttctgcattcttattatcttcccgtgccaccaaaatattcacatacggcgaattcttatcttcaataaatacgctgtcgtgcaccggagaaagcccggtctgctgaatgtaagtggtgctgataatcgctacatcaactttgggatcatccagtacgcgcgggagctgcgccccctcgagttccataatctgcaaatgacgaggattatcggttatatccagcgcggtaggtaataacccttttccctctttcagagtaattagcttctctttttgcaacagtaaaagtgcgcgaccaaggttggtcgggtcgttggggatcgccactgtcgcgccttcttttatttgcgccacggttttgatttttttggaataacccgccatagggaagacaaacgtatttcccaccgctaccagtttataaccatgcgcctgattatcttgttcaagaaagggtcgatgctggaagacattcgcatcaagttcgccatgatttgtcgcatcgttcggtagcaacgaaccgctaaatcctaccagttcaacatcgaggccatatttctcttttgccacctttttagcgacttccgcgacatcttgttctgcgccatttataacgccaactttaatgtgttttgcatcgctgctactctggtcgcaacctgccagcagaattccggccagcaataatgcggcccctgtccgtagatgatgtgttgtcagtttcatttttttatccttttattaatgattacctgactatagcggtaaggtcgctgcggtttaaaaaacgaaacgctatcgataagaataaaaaggaataaaagtggaatataaagtctggcacttcttactgaccacgcaagcgcgtttcgtacagcatgatgagagcgatgaaagcaaactacacttatgcttcattcgatacacatttgtaaaaggttgaatccatgaaaccaacgacactactgcttattttcacttttttcgctatgccaggcatcgtatacgccgagtcgccttttagctcactgcagtccgcaaaagagaaaaccacggtattacaagatttacgtaaaatttgcacgccacaggcgtcattatcagatgaagcgtgggaaaagttaatgttgtcagatgaaaacaataaacaacatatacgcgaggccatcgtggcgatggaacgtaataatcagagcaattattgggaagcgttgggtaaggtagaatgcccggatatgtaagaacagcaacaactactgaccaacgcttctttacctgatatcaggatttcttcattttcacctttgcagtaaccaacaatgcagtcagcaacatcaatgtgccggacaacatcaacggcgaagtcagaccaatattatccagcgcataaccgccgattgccgcgccacaggtattagcaagctgaataaccgccacctgaatagacccggctttttctgcctgatcggccagcgagcgggtgatccacgttgaccagccgacgggaaccaatgcaaaagttagcccccagataatcgccacgccggtagcaacgattttatcgcttccccacaacgtcagtaccaacgcactcacagccagtattaacggcgcgcctgctaaggccagttttaccgaacgtttaagaatgaacgacgaaagcgacgtaccaataaagctggcgataccaaaactcaacagcaccagcgttaagccatccacgccgaatcccgccaggttcatatacaccgggcgaatatacgtgaagaaagcaaactgcccggcgaaagacatgaagatggcgatcatccctgccatcacacccggacgttgtaataagcggaaagtattttgtttctgatgcgagggttcgcctggcagtgaaggcaatgatttgataatccagaaaatacacagcacgcccatcaccgccgccgcattaaagacattgcgccaaccgataagctcgcctaaaaaactgcccaacggcgcggcaatcaccagcgcaatagaaaccgcgccgaagatcaccgacagcgccttcggcaccgtacgcggcggcaccagacgcatggtcagcgacgccgacatcgcccagaacccgcccagcgccagccccagacaggcacgaccgattaaaagcaaactgaatgagttagcaaaggaaaccagcaagcaggagagcgtcagcaaaacggcaaacaaaataacaacgtagcggcggtcagtagcctgaattgtctgggtaataaacaaactggcaaacattgccacaaaggcggtcacggtcaccgattgcccggcaaccccttccgaaatgcctaaatcctgggccattggcgtcaacaaactgacgggcaaaaactcaacgataatcagacaggcgacacaaaacgccaccgagaaaacggctgaccagttcggtcgggtgatggcatccgcgccgcggttttcggcaataaattcactcatggtgttacccgtggcatgtttcaggggaaaagccgaccactttaacattgaaatgtgtgacgcatttaacgtttttgcaacttttacggtgttgcttgagctggagttaagatcgaaacggaacagggcaaagattaccggatgcggcgtgaacgtcttatccacccgacaggtcaggcgcggtctgtaggctgataagacgaaacggtttcaatgcaaccagtgaacgccctcggcaggctgaaagaacgcgttatagcgcatctgaaaagcattaatatcctgcatttcaggttcggtttcgcgcagaaaacctagcgccagcctgacctgagcgtcggtaatcggcgcggcgaggcgagctttttgtaaaatccgatgccattgcagcaggttctgttcgctaccatcgacaatgacaatttgccagatgagcaacacctgcgcggcgttttgcaggtgcgactcatccggacgatgcaaataacgtaaaaattcgtcaccagctgactttcccatttgatcgaccatcgactccacgggtacgacatcgatgttcagccgatcgctgagacggcgaatcgcttttctggccccggatgtcagcacccgaaaaccaaccacaaacactaccgccagcgtggcgagcattatccagatcatgagttctcctgcgtaatcagaactcatgatatctggaaaccctcgccagttactaatccaccagaataatcttcagtgcaaacagagctgcgaccaccaccacacacaggttcagatcgcgccagcgcccggtgcatactttcatgatgcagtacgacataaagccgagtgcaatcccttcggtgatcgagaaagtaaagggcatcatcaccgtggtaataaacgcaggcaccgattcggtaaaatcatcccagttaacgcgcgccaggctcgaagtcatcagcacgccaacaaagattaacgctccggcggttgcgtaaggaggaactatcgccaccagcggtgagaagaacataaccaacaggaacataacgccaaccacaaccgcagtcagccccgtgcggccaccgactgccacaccagaagtactttcaatataggcagtaacagacgaggtgccgataaacgcacccgccaccgaactgacgctatcaacatacagcgccttattcatattggggaatttaccgttaccatctattaagcccgctttatcagttacaccaattaatgttcctgatgaatcaaataggttgatcagcataaaggagaaaatgataccggcgagttcaagtgttaacgcgccgctcaaatctacttcaccaatgacgccgctaatatcaggcggaatggaatagacgccgctaaaatgaacatcaccgaaaaataatccacagcaagacgtcaccacaatagaaaccagcaccgcggcatgaaaatgacgtgatgacaacacggttataataaaaaaccctaaaatacctaacaacacgccgtgagaacttaaatcgccaatcatcaccagcgtgtctttattggcgacaataacgccagtattttttaatcccattaaggcgataaataatccaattccgctggtgataccaatacgtaaacttaagggaatgttggagatcatccagtaccggatacgaaacagcgtgagcaaaaatagtccaactgcgccccagaatattgcgcccatcccggtctgccaggagatgcccatcgcccccacgaccacgaaggcaaagaaggcgttcagccccattgccggagccagcgccacgggtaagttagcaaatatccccatcgcaatactgccgataccggcaatcaaacaggtggtaacaaacaccactttcgggtccatttgtgccgcgccgaggatttgcgggttcacaaaaacgatgtacaccatggttaaaaaagtggtcatccccgcaatcaattctgtgcggacggtggtcccatgctgaggtagtttaaataatcgcgaaagcgtccctgattcattactcacgtaatcggtattgtcattattcatttttttgtccattggaggagatttaatcccttgcttttgtaaaacaaatgacaacaacggttcagtgataattatcacatttcaattgcacattaatggatattctttaataatctcgcgacgtttctttatgataaataataatcaaattgataaaatcaaaatgagaaaaatatgaataattctattaaccataaatttcatcacattagccgggctgaataccaggaattgttagccgtttcccgtggcgacgctgttgccgattatattattgataatgtctctattctcgacctgatcaatggcggagaaatttccggcccaattgtgattaaaggacgttacattgccggtgttggcgcagaatacactgatgctccggctttgcagcggattgatgctcgcggcgcaacggcggtgccagggtttattgatgctcacctgcatattgaatccagcatgatgacgccggtcacttttgaaaccgctaccctgccgcgcggcctgacgaccgttatttgcgaccctcatgaaatcgtcaacgtgatgggcgaagccggattcgcctggtttgcccgctgtgccgaacaggcaaggcaaaaccagtacttacaggtcagctcttgcgtacccgccctggaaggctgcgatgttaacggtgccagttttacccttgaacagatgctcgcctggcgggaccatccgcaggttaccggccttgcagaaatgatggactaccctggcgtaattagcgggcagaatgcgctgctcgataaactggatgcatttcgccacctgacgctggacggtcactgcccgggtttgggtggtaaagaacttaacgcctatattactgcgggtattgaaaactgccacgaaagttatcagctggaagaaggacgccggaaattacaactcggcatgtcgttgatgatccgcgaagggtccgctgcccgcaatctcaacgcgctggcaccgttgatcaacgaatttaacagcccgcaatgcatgctctgtaccgatgaccgtaacccgtgggagatcgcccatgaaggacacatcgatgccttaattcgccgcctgatcgaacaacacaatgtgccgctgcatgtggcatatcgcgtcgccagctggtcgacggcgcgccactttggtctgaatcacctcggcttactggcacccggcaagcaggccgatatcgtcctgttgagcgatgcgcgtaaggtcacggtgcagcaggtactggtgaaaggcgagccgattgatgcgcaaaccttacaggcggaagagtcggcgagactggcacaatccgctccgccatatggcaacaccattgcccgccagccagtttccgccagcgactttgccctgcaatttacgcccggaaaacgctatcgggtcattgacgtcatccataacgaattgattacgcactcccactccagcgtctacagcgaaaatggttttgatcgcgatgatgtgagctttattgccgtacttgagcgttacgggcaacggctggctccggcttgtggtttgcttggcggctttggactgaatgaaggtgcgctggctgcgacggtcagccatgacagccataatattgtggtgatcggtcgcagtgccgaagagatggcgctggcggtcaatcaggtgattcaggatggcggcgggctgtgcgtggtacgtaacggccaggtacaaagtcatctgccgttacccattgccgggctgatgagcaccgacacggcgcagtcgctggcggaacaaattgacgccttgaaagccgccgcccgtgaatgcggtccgttacccgatgagccgtttattcagatggcgtttctttctctgccagtgatccccgcgctaaaactaaccagtcaggggctatttgatggcgagaagtttgccttcactacgctggaagtcacggaataataaaaaagcccggcgtcatgccgggcaaaagtcaccagttacgtttatgccactgtcaactgctgaatttttttctcgcggcggattttgcgttcttccatcaccgccactatcgccatcaggcagatacaaccaatcgcggcgatatcaagtgcggcgaaggtgcctgcccagccggtaaggccgaataccggcgtcccatcggcaatcattcccagacctaacttggcaaagctgtcaccaatcaggtaagcaaaggtgcctttaataccatcggcagcgccaatcgcttttttaggtacaaagccaacagcagccacaccaatcaacaattgcgggccaaagaccaggaaacccaacgcaaagagagaagccagatagatatattcgttgctggcatgttgatacacaccgagcgtggcgataatcagcgccagcgcgatgcaggccaccaggccacggcgaccgttcgccaggtcagagagccagccccacagcagcgtaccgaccagcgcaccagcttcaaacagcgtaaagccctgaatcgccaccgctttagagagtttcagttcctggaacgcgtatacggttgaccactggtcgataccaatacgtaccacatagaggaaaatgttggcgaagcacagcagccagatcactttgtttttcagcacatactcaacaaagatctgccacttggtcatatcggtagattctgtctctttgtcctcttcgctgatctcctcgccgaacagttcttcagctttgccgaggccataagattccggggagtcgctgccgtaacgcaggccgataaaaccgacaatcagcgcgataatcgacgggaagataaacatgccgatgacatggccatcgaacaggtaatttgccccgaacagcgccacacctgctgcgcctgcaccgccaaggttgtgagaaatattccagaaaccgaggaatgtcccgcgtttacgacgcggcgtccatttggtgatggtggagtaactgcacgaaccgccggtactctggaaaaagccgcttaaggcgtagaaggcaatcatcaggaacaggctaaccgagccgctgcccatactggcactgaagcccagcatacaaatggcagacaggatcagcatgaacggcaggaattgtttggtgtttttgccgtcggcgtagtaggaaaccagcgttttacccacgccataagtgatggagaaacccaggccgatcatccccagctgcgtcatgctcaacccgtaggtcgagatcatgtcgttctgcgcgatgttaaagttcttgcgaatcaggtacatcgtcaggtagccgataaagaccaccaggtaggattgcatgaacggtttgaaccacattttgcgccgcacttcgagcggaaggtccagggtcggcttgcgaacctggtttaagaaagccagcatgggttactcctgaaatgaatacctgcgtgaggcatgcattgtaaaaatcagcagcaaatcaggcctgagatagcgtccaggcaaaacctggaaaatttcttagttttgccggatatgaagtgaaaaggtgagatgcatcacgcttcgcgcggtgtctgggcgttcaaaaagggcagtaacagcagtgcggaaatcccggcggcgatagagataaccacaaaaaatccgctccagtgccaggtatcgagtactttcgccagcggccaaccagcaagcgacgcccccagataagcaaacaagccgacaaaccccgtcgccgcccctgccgcctctttgtgggaacactctgccgccgccataccgattaacatctgtgggccaaagacaaaaaaaccaatggtgaagaagcaggttgcctgcatcacgtagctggcaaatggcatcagccacagggagccgactgaaagcaaaattccggcggcgaaaatcaaattcatcggccctcggttgccgttaaacaatttgtccgagccccaaccggctaccagcgcaccgataaatccgcccagttcaaacatcgtcactgccgtattcgccgtgaccagatcgacgcccagtgtctcggacatatacaaattgccccagtcgttgatcgccgcccggaccacatagaccagcacatagcaaaacgaaagcagccagatatacggattcagcaacacatatttggtgaggatctctttacgcgtcaaccctgccccttcttgttgttgagcaatttccagcgcgtcgtgtcgccattcaccgaccgccggtaaacctaacgcctgcgggcgatcgcgtagccgccagcagagaaaaatccccacgactatcgccatacaaccagcaatcatcatcccggcacgccagccgtaatgcagcgcagccgctgccatcacaatgggaatgagtgcgccgccgacgttatgcgccgtgttccataatgcccaccaaccgccgcgctcggtacgtgaataccaggccgttaacagacgcgcacacaccggtgaaccccagccctggaaaaaggcgttcagcacccagagcacggcaaacgcccatagcgacgtcgagaagccaaacagaatgttgataatgcccgtggcgataagccctatccccataaaataacgggcatttgagcgatcgctgacaatgccggagacaaacttcgacacgccataggtaatgtaaaacagggtcgctaacaggccgatatcgctacggctgagcacgccgttagcaaggatttctggtacggcggcgttaaaacttttccgcgtgaagtaaaacagcgcataacccagccagatggtcagcagaatatgccgacgccagtagcgatagcgggcatcaatttcatatttatcagtcattaatggcgcatcggcaggcgctttcagaaacggcaacatcatcaaaccttagacatagcgttgaggtagagaaacgctgacacgcgtgccgtgcagacaggaaatgtgtaatgtgccacccagcgccgttacgcgctcgcgcattccggtgaggccaaaaccttgttgcccggaacccggcggcaaaccgctgccatcgtcttcaataaccagcatcaaccgttcatcctgctgccagccttgcagcgtgaccgcgctggcatcagcatgtttcacaatgttgttcagcccttcctggcagacacgaaacagcgtcacgcgctggttttcacttaatgctgattcatcgattcgccattcgagatggctgacaataccgcgcccttccagctccatttcccgcatcagtgagcggatggcctgctccagggtgagatcatccaactggcgcggacgtaaccgacccaacaaacggcgcaccgcgtcgtaaacgcccagcgatagttgttcgatgagctgcccgctctgcttcacgctggcgttatctgccgccagccgctgaacaatgcccgcctgagtacgaatagcagtgatggtctgaccgatatcatcatgcagctcacgcgccacatcacgacgcacgctctcttcggtttccagcaaccgttcagccagatgctgattgcgcgccagttccttttgcagcgactggttaagttcacgcaaccgctggatgccagcgcccagtaacaaccctgtcagactttgcaccagcaacgagagcaataaatccaccggatgatcgcgccaggtttgactggcgatcagcgcgatggcgttcatcaacgtcgcgatcagcgccccttgccaaccgtagtgccaggccagcgcgataatcggcagcgccaggcagaatggcgtaaagcgcgacagttcgtccggcaatcccaactggaaccagagactaataacaaacaacagcaagtaccagaccagatgccgcccgcgccagttgatcggttgagaaaccagtgacgggccgagcggcagccaggtgttattggcgagatagtgccagaacaccagacatatcggggccagcgtcaggccgccagttaaagtcagcaacagcgcattccacgactctttgccgtgccaaagccagggcagcgactgcaacaacgccgccgccgttaacgccgccccctgtaacagcaaggtgcgccagtcacgctgatggcgatagcgcgagatcagcgctacgggcagtaacgtcagtaaactaccgatcatcaataacggaaaatgggttaaaccgaccgcctgcgttagccagtaaatcagcagccattccgcacccagcaatacgggccagtatccgcgcgggcattgcagcattagccctagccgcagaccaaacggaaataacagcaccgccatatcagggcgctcaaccaggtgcaggctgatactccacaggcaaaaccatgcggcagagaagataaaaaagcaggcaataacggtaattaagcgggagaacaacgtcttcatcaccagccatcaaacatgcggcgcgccagttctacgtcgttactgacgcccagtttttccatcagattggcgcgatggacgtgtaccgttttcggtgacaagcccagttcggcggcaatctctttcaccgccattccttgcgccagtttttccgccacctggcgttcacgtttggtcagcgggtcctgacgaccggatgccagtttaatggcaatatccggcgtcagataacagccgcccgtagcaaccgtatgcaccgccgcaatcagttcgtcagggctacagcgtttggagagaaagccgcgcgcccccgcgttaagcgcctgctcaaccagcgccggactgtcatgaacagagagcattattgtcgccatacctttcggcagctggcttagcagctccagaccggagatatcgggcatggagatatcgcaaatacacacctgcacaccgcgccccggcagccccgccagcgcctcgcgccccgaaccaaactcggcaactacctgcaaatcaggttccagccccagcaactgcgcaaagccggagcggacgatgaggtgatcgtctataagggcaacggtgatcatggtcttgtcctggcgggtaaaaaaaaacgcgcttaccttaacgataagcgcgatgttgttcaagccttgagcggttactgaaaaaacaccgcaatcttgttaaacatagtcggatcggactgattacgctgcactttcaccacatcttccagcttatcgatttggcttatcatctgctccagacgctggtcgtcattgaccagtagccagatgtggcttttgtcgctgtcctgaatcggcaggcagagaatgccttcaacgttaaaagcgcgacgggcaaaaaggccacaaacgtgggtcattacgcccggatggttgcgaacggtgagttccagaatcacgttgtcatgagttgtgttttgcatggcttattcccccaccatttcagtattcgccgcaccaggcggcaccatcgggtaaactttttcttcggcatcaatgcgcacatggatcagcgccggaccagggcgattgatgatttcctgcaatgcagcctgcggatcggcttcgttattcaaatcacaggtttcgaggccgaatccggcggcaatctgcataaagttgattttgcccggataggtggcggcaaaaacgccctgctcgtagaacagactctgttgctgatgtaccagccccagcgcttcgttgttcatcaggatgattttgacatccagctgattttcactggcggtcgccatctcctgaatattcatcatcaggctgccgtcgccggagaaacacaacactttgcgatccgggttcgcaagcgacgcgccaatcgccgcaggcaggccaaagcccatcgtgccaagcccaccggaggtcagccactggcgtgggcgattgagcggataagcttgcgcggtccacatctgatgctgaccaacgtcggtggtgataatcgcattgtcatcgacacaggcggcaacggcgttgatcaggccgtaatggcttaatggatcgcatgctttcgggattggacacgggaattcacgctgcaaatccgctaccaactggtgccactctgcacgcggttgcgcttccaccagcgggatcaattgcgccagcacgtcatcaacatccgcctgaatcgctacgtgcggttgcttgattttacccagctctgcacggtcaatatcgacatgaataattttggcattcggacagaactgctcggttttgccaatcgcccggtcatcaaaacgcgcaccgagcacaatcaacaaatccgcctcctgcaaaatatagttggtactgcgcacgccgtgcatccccagcatacccagcgacaacggatgcgcttttggcagcatgcccagcgccattaaagtcatggtggtaggcagttgcgctttctccgccagttcacgcacccgcgcaggcgcattgatcacaccaccacccagataaagcaccgggcgtttggcagcgttaatcattgtagctgcgtcacgaatgctttcttcgctaaaggcgggtgcagcggctttttctgccaccgcgggctgagcttcaatctcaaaaaccgccgtttgtacatccttaggaatgtctatccacaccgggccagggcggcctgattgcgcaatgcggaaggcatcgctcatgacctgcgggagttcttcgatatgtctgaccagatagttgtgtttggtgatggggatagagatgccgtaggtgtccacttcctggaaggcgtcggtgccgatcatcgaggcaggaacctgaccggtgatgcaaatcagcgggatggagtccagccgcgcatcggcaatggcggtcaccaggttagtcgcacccggtccgctacaggccatacagaccgccggtttaccgtcggtgcgcgccattccctgagcgataaagcccgcgccctgttcatgacgggccagaatatggcggatttgcgtgctttggcttaaggcatcgtaaacaggcaggatagaaccgcccggaatgcctgtcacaatcttaatgccctgctgttccaggaaatgaacgataaattctgcgccggtaaagcgcttacgcgtcaatgttgtgcccgaacttgccatgctccagtccttttcttctgggccgactttccgggaggtgcttaaacgaaaaaccccgcccggtttgcgccggcggggttttggaatcgtgtgttgttccagtccctacggcgcattgccgacgaccaccaccacacgcacgacgaccactgcggcagatggcgcagttggtagtagttttgcgttgaacatggaagtagtcattggggaccttgttggttttgtgtttaacaatatttatacaagcacagctttacaggggagacaatggaaaatttttcagcaagggaaaattgaggggttgatcacgttttgtactgaattgcagataacaaaaaaccccgcggagcgaggtttcatcagccgcctgcggctggtaaccgcaaagcacactggattatgtcaacactgaaagtatacgtgttccgcgcagaacgcgcaatttcggcacgaattttgacgtatttagggcatagttgagtatcgatcacagtttgcgttttgtccaaatattactgtttatttatacagtaaacttctataatatcactgtacgcaatgtgttatgcgggggccgcatcgttacccggcgcactaagtcctggctgaaacgggtggtgccgtcagcgccttaaccccgcgtgagcacactgtgttatgtcaacaagcacaacgtttctccttgagataccgcgtgcacaacagctggcaacaggcagcggaaaggtacgtcagctggcagtgctcctgaaccacaggagacgcgtatgagcctggtggatatcgccattcttatcctcaaactcattgttgcagcactgcaactgcttgatgctgttctgaaatacctgaagtaattcagattcaagtcgcaccaaaggggagcgggaaaccgctccccttttatatttagcgtgcgggttggtgtcggatgcgatgctgacgcatcttatccgccctaccatctctcccggcaacatttattgccgcttttgtttacatattctgccgctaaacaattccccattcctggcgtatatctggctaacattcatcaatgtgatagattcctctcccgcatttatgggaatgcgtagtgacttattctaattatttttataaaagcatccgtgataatgaaaaggcaaagaaacgtcaatttgttattgatgttggtattactcgtggccgtcggtcagatggcgcaaaccatttatattccagctattgccgatatggcgcgcgatctcaacgtccgtgaaggggcggtgcagagcgtaatgggcgcttatctgctgacttacggtgtctcacagctgttttatggcccgatttccgaccgcgtgggccgccgaccggtgatcctcgtcggaatgtccatttttatgctggcaacgctggtcgcggtcacgacctccagtttgacggtgttgattgccgccagcgcgatgcaggggatgggcaccggcgttggcggcgtaatggcgcgtactttaccgcgagatttatatgaacggacacagttgcgccatgctaacagcctgttaaacatggggattctcgtcagtccgttgctcgcaccgctaatcggcggtctgctggatacgatgtggaactggcgcgcctgttatctctttttgttggttctttgtgctggtgtgaccttcagtatggcccgctggatgccggaaacgcgtccggtcgatgcaccgcgcacgcgcctgcttaccagttataaaacgcttttcggtaacagcggttttaactgttatttgctgatgctgattggcggtctggccgggattgccgcctttgaagcctgctccggcgtgctgatgggcgcggtgttagggctgagcagtatgacggtcagtattttgtttattctgccgattccggcagcgttttttggcgcatggtttgccggacgtcccaataaacgcttctccacgttaatgtggcagtcggttatctgctgcctgctggctggcttgctgatgtggatccccgactggtttggcgtgatgaatgtctggacgctgctcgttcccgccgcgctgttctttttcggtgccgggatgctgtttccgctggcgaccagcggcgcgatggagccgttccccttcctggcgggcacggctggcgcgctggtcggcggtctgcaaaacattggttccggcgtgctggcgtcgctctctgcgatgttgccgcaaaccggtcagggcagcctggggttgttgatgaccttaatgggattgttgatcgtgctgtgctggctgccgctggcgacgcggatgtcgcatcaggggcagcccgtttaagcgcacgtcaccgcagcatcgtcatcagctccatgggagaacgatgctgctttatcagatcacgcatcacccgcatatgcggtgcggagtaagaataaaacgcctgatagcccgcacaaagcacgctgtctggcgtctcctgccgagcgtgcgggcacaggcgatgccagtcgcacgcctggcagtcacagcgcggttgcgggttttcgctgccacaccatttttgtaaggtggcgtcaaaaagctcaatcgagatacgactgatatctgcccgcacccaacactcgaacagggcaattaaaaatttcccccacagctctgctgtcaccgaagcggccgtcagatcgccccggtcatcaaattcaagatagggaatgagctgtacggagcggatgccccgctgtttgaaattgtgataaaaatcggcaggttgcagagcatccttgtactctacaaccagtttatgcctgtcctcttcagcatcaatgacctgacttcctgtcatgcgactctctcaataaatacgataagttgatgtatatgcgttacagcaaacagtattgcgagagataacaccgcgagggagatcaaaaatttgtcacggactacgtgaaattgggaaaaatcgctattcgtgacatccattaaattgcgattacgggtgtagtgccagaggatcagcgccacgatggcgagaatgccaatcgaaatccagaataacatgcccgcctggtgccagttgtgtttgatagccaacgccatcaacgcgccgtagcccagcatggtacgaaaccacgccagtgatgtgcgctccggctgcagtcctgggtcggcaatgcgtctggctttgcggctatccggcatacaacaccagtcccataacgatcaccgccacgaccatcaatattaagctaatgattaataagctgttggtgtagggcaggtcctctttcagacgcatcgctttttcattgcgtaaccagcgcaagtagccatacatcgctaacccgccggaaaacagacacaacaacaacgccagcagttcgcgaatgacgggcgtggcgaaatctggcgcaagttgatcaagcccaacccccgccgccagaaatcctagtgcagtacggatccacgccagaaaagtacgctcattagccagcgagaagcggtaatcaggcgcttctccgaggcgggaaattttcattgttgctcctttgcaatttcactaacgctctacctttagcggtttttttaagaatttcgtccgcccgtttcctgatatgcttttgccatccgctacaaggaggtcagatgggtatcatagctcaaaataaaatcagttcattgggcatgctgttcggtgccatcgctttaatgatggggattatccacttttcattcggccctttctccgcaccaccgccaacgtttgaaagcatcgtggcggacaaaacggctgaaattaaaagaggtcttctcgccggaataaaaggcgaaaaaattaccaccgtggagaaaaaagaggacgtagatgtcgataaaatcctcaatcaaagcggtatcgcactggccattgctgcgctactttgcgcatttattggcggtatgcgtaaggaaaatcgctggggcattcgcggcgcgctggtttttggcggcgggacgctggctttccataccttgctttttggtatcggcatcgtgtgcagcattttgctgatattccttatcttttccttcctgaccggcggttcactggtttaagcagcctgaataatgcccgccgggtgatcatcagcgggcattatcgtcagaacttctgttttttctcctccaccttcaccccttgtgtcggtaggccggtgtcatagtcgcgtacaactggcgaatagccatcttgtggacgtggacgaaacgcccccatccagcgcggccgtgcatctttacgccacggacgcagactccattggtaactgcggaacggatcgcgaattttgtccatgtaatccaataaggcgtcatgcattttgctgcgaacgtctgcaaaacggatatcatcgatcaggttatgcatttcatttgggtcattacggcgatcgtaaagttcatcactggtgaagaggttgagtaccagtttaaagtcatccgtcacccagcaacgcaccggaataaaaccgccaaagctgtcatgctcaatctcgtagcggttaaattccaccatcacgccgcgtggctctttcacggcaaggatattttcccccggcagaatctctggtttttcaatatctgccagcgccatcattgtcggcagtaaatcgatatgactgactggcgtatcgacctgtcgccgctccccttgcggcgaacggatgatcagcggaatgcgggtgatgtcgtcatacatcgccgcccctttactgatcagcttatgtgcgcccatcatttcgccgtgatcggaggtataaataacccacgtattttcacgttgctctggcgttaaggcattgatgacccgtccgatttggtcatcaacaaagtcattacaggcaaaatagagcggatggtgataaagcccgtcatcaccgactggcgatggcatcgcctgcgcccataagcggtgatgttccggtttgttagccaggtcatcctgtgctttctcgcccagctcgtagtaaaaatcagcgtatttctctaaatactccaccggacaggtgaacgggtgatgcggctcatcatacgaaaccaccatcaggaaaggctcgtctgcgcgcgcaggctgttgcagaaaatccaccgcccgattgctgatacgatgcgcccaggtgaaggtttcgtcgatatggttcgcctgtaaatcttcgacgctgtttaggccattgcgccacaggctaatctctttttccgtcagttcgctaagatagttcgccccatcgaaccagtaatcagcgtcccactccggcggacactcgccagtgccgaaatagtcatgaccgtcgagatgccatttgccgatgtaacaggtgtgatagccggcatccttaaagtagcgccccatagtggagatgtttttgcctggcgcgacgttgttggtccacgggccggactggttagcgtagataccggtaaatagtccggcccgtgcaggcgtacaaaccggtgaacaggtgtaggcggaattaaagcgaataccttccgccgccagactatcaatattttgcgtattcagcggtttaccgctatagcaaccgaccatattggtggcctgggtatcggtcatgacgaacagaaaattggggcgtttcataggctatccttcccgtcgggagtaaaggttacggctgggtcgtgacgatgccgccagctgtcaaaaatcaggtagacaatcactacggcggcaatgaaataactgatcatcgctaaccagcgcgtaccgtagccgccgaattcagccagcccggcatagacgccaatcatcgcgaacaggatgccaattgacgcgatcttgacgtttttccacggtttcatgtccaccgcaaacgcatctttgaaggtgaacggcgtggcgcgcggtttgataaaaccgatcaccagcatcacgaccacgttgatgcagaacgtacaggccagcacatagaggaaatggaagtcgaacttcaccagatagttgatggtgatgtagctgattatgccaatccccatcgctacttttgccgccagcgccgggatgcgcgggaagaaaaagcccataatgatgatggtaaccagcggcacgttgtaaatgccgttgagctgtttcatccagctatacagcccctgcggcgcgttggcgatccacggcgcgaccagcaccgaaacgatagcgataaagaaaccaaatttgcgcccgacggtgaccagctgctgcggctcggcattctggttaatgatgcgacggtaaatacccatactgaataacgtactggcgctattcagaaagccgttgaaggtactgatcaccgcaccaaataacaccgcgccgaagaaacccaccattggcactggcagaacgttattgaccagcgtcgggtaggccatgtcggctttcggtaaatcctgatacagatgaaacgcaatcaaccctggcagcaccagtaccagcgggtcgagcattttcagcaccgccgttaacagcgcccccttttgcccttccgccaggctttttgacgccagcgtgcgttgcacgatgccctgatttgtacaccagtaaaaggtgttcaccagaatcaaaccggtaaatgccgcgccaatcggcaagggatcggtcgggccaccgattgagtttaatttctcggcgtgaacggtggtgagttgctcaatgccctgcataaagctgcccttgcccatcgcgatcaggccaaataccggcaccatcaacccgccgataaccagcccaataccgttgatggagtccgccactgccattgcgcgcagtccgccgatcaccgcatacaaaattcccgccagaccaagcaaaattaccagtagccagatagccgcaccgtgagaaatctgtagcgattccccgacgtgaaacaggctgttgagcgccaacgcgccggagtagagaacaatcggcagaaagcagacgccggtggcaattaggaagcagaagtcgatgataatacgcgtcgttttatcataacgttcctccagaaaatcggggatggtggcaatgccgcgcttcagatagcgcggtaaaaagattagcgcgaggaagatcagcgtcaccgctgaagtcacttcccagcccatcaccgacatgccgcttttgtaggcctgcccggaaaggccgaccagttgttccgtggaaaggttggttagcattaacgaagcggcaataaccggcgcttttagtgaacgtccggcaagaaaatagccttgttgcgatccggtatctgttttgcggaccttccaccaggtgatcaccgccaccagcagcgtaaaaccgacaaaactcaagatttgtaacgaattcatctcatagcccttatttatgtttatgtcccggacgcatgaatatagggagaggtaaaatgcgtcgggtcaggcagtcagattcttaaaatacaaacgtcgtatccctgaacggattgttttctgttaagttcaggttgtgagcataattcgccggagggatattaaaatgaatggaaaattgcaaagttcagatgtaaaaaacgaaactccgtacaatattcccttattgattaacgaaaatgtgatctccagcggaatttctctgatctcgctctggcatacctacgccgacgagcattaccgggtgatctggccgcgggacaagaagaaaccgcttatcgccaactcatgggttgcggtgtataccgtacaaggatgtgggaaaattcttttaaagaatggcgaacaaataacactgcatggcaactgtattatatttttaaagccaatggatattcactcttatcactgtgaaggtttagtctgggaacagtactggatggaatttacccccaccagtatgatggatattcccgttggtcagcaaagcgttatttataatggcgaaatttataatcaggaactcactgaagttgctgaattaataacttcaccagaagcaataaaaaataatctggcagtcgcttttctgacgaaaattatttatcagtggatttgtcttatgtacgcagacggtaaaaaagatccacaacggcggcaaattgaaaaattaattgccactttacatgccagtctgcaacaacgctggagcgtagccgatatggctgccacgatcccctgtagcgaagcctggttgcgtcgtctgtttttacgctataccggcaagacgccgaaagaatattacctcgatgcgcgtctggatctggcgctatcgctattaaagcaacaaggaaactcggttggcgaagtcgctgatacgctcaacttcttcgactcctttcatttcagcaaagcctttaaacataaatttggttatgcgccgtcagccgtgctaaagaatacggaccagcacccaacggatgccagtccacacaattaacgtaactctggccagtacgctttgttggcctccagcaattcatccagaatagctttggcgaccgaggcgctcggtaccgttttcgacaacgtaatcgcctgccacaggtgctgatatgaacgctgttcccaggcgtccacgaccagtttttccaccgccacttgctgactcattaaccctttctgaaactgcgggatatcgccgaccaccagtggttcaggccgtagtagcgcacgcgcatctgtttgcgatcttgcagcccaacaatttgcgccatccggctttcaataccgattggcatgtcacagatgttgaggattttcgcattcgggcgcagacgacgcgtggcttctgcgacaatggctgccgggttggagtagttgagcatccaggcatttggtgaatatttttccatataatccaccagttccaggacgccgccaatggaacgcatgccgtacgctattccgccgggtccgcaagtttcctgaccaacaacgccgtggcgcagcgggattttttcatccagttcgcgcatcgggtatttgccgacgcggatgtgcgccatgacaaaatcaacgtcgctgaatgccacttcaggatcggtggtgtaactaaacgcaatgtccggcgctttttctttaaggatgactttacaggcttcggcaatcacttcctgccgcgcaccatcgttatcataaaatttcagtgcacgaagcgggaaacggtcctgattcgccaggagcatcaacacgatgcctggcgtaaaggtgcttccaccgcctgcgacaaccactgagaatttggtcattatactgcctccgtaatggcaacattttctgctgattgatgagaattaattaagctatcgagctgttcacgcagctgagatacatgcagaccaatgatcacctgaatggcatcgccactacggaagacgccgtgcgctcccagctttttaaagacttcgtcatccagcgtttgtgacatgtcatgcagtgcaatacgtagacgcgtcgcgcaattgttgatgctggagatattgccgaccccgcccagggcttgcaggataccggcagcctgatccaactctttttttggctctgcagcggtggtttggcctcgcgaggctttatattcggcttttgagtagagtttcacttccgcatcttcacgtcccggcgtacacatgttgaactgcagtatcagggtgcggaaaaccacgaagtacagcagggtaaagcacaacccaatggcgatttgggtcagcatcatatccgcgtggttgctgaacatcgggatccagttttgcggtaaaacctggtcaatcagacctccgcccatgttgcccaccacaccaaagagatacattacggtcgacattgaggccgcaagcacagcgtgtaccgcaaacagcaacggtgaaatgaacaggaaggtaaattccagcggttcggtaattcccaccagcatggcggttaaggttgcggggatcagcaagcccgccacttttacccgattttccggtgcggcagtgaagtacatcgctaaagaaatgcccacggcaccaaagatttttgagttaccgtgcagggcaaaaccgccttccgggaacaacgatttcagcggctcggcgctcagactgaactcttgcagatgctgcgcccagtacatctgaatgccgccttcaacagctgccggaccaaagataaacggtccgtagatgaagtggtgtaaaccggttgggatcagaatacgttcgaggaaggtgtaaacccacaccccaagcgcacccgccgaacgcaggaacgcttgcagagattcaatccccatttgtacttttggccagccgagcaatgtcagccaggcacaggggatcatcaccaggaaggcgataatcaccacataagacgtcccctggaaaatgccgagaaacaccggcagttttttatcgaacagacggttatgcagcgccgtcacaatgccggaaatgataattgcgccgataatgctggtatcgagggttttaatcccggccatcattgtcagaccgctacctgccaccgcgtcctgagtgaaatcgacgccgaagtaacttccccaggtcattcccatcgcattaatgaaatagttccaggtcaggaaactcaccatcaccgccagacaagcacgcccctgcgcttgcttagcaaggccaatgggtaaaccgacagcaaaaatcagcggcatattacggaataccgtccaaccgccctcttcaataatgtgtacgatttgcgcgaataaactgttcggatcggtcagtgattccccgacaaacatcgggttttgcaacaagatggcaagacccaccacaatcccggcgaagggaaacagcagcactggcgtgaacatcgcgccgccaaagcgttgaatttgactgagcatttccacatcctcttttctcaattctgtaagtaggaagcctgattggttatgcggcaggcctggagcgaggataggaagatgcgatcggcagaacatgacgacccaatgggattcgtgatcgctttcatgcttttcgttgggcggtagagatctacgttttcgcgaaaaagtagacctctgtgagcacaggtacacagcatcgaacacatctttaaaaaaaagatgttttttcaatcgattaagcagaacttgtgtgcgcattacccgggcttgcaggcaaaaaagagatctagagatgatctacaaaagcattgcggagcggttaagaattcgacttaactccgcagatttcacgctaaacagccttcttcccggtgaaaaaaagctggcggaagagtttgcggtatcgcggatgaccatccgtaaagccattgacctgctggtagcgtgggggctggtggtccgccgccacggtagtggcacttacctggtgcgcaaagatgtactgcatcaaaccgccagtctgaccgggctggtggaggtgttaaaacggcagggaaaaacggtcaccagccaggtgctgatttttgaaatcatgcctgcgcctccggccattgccagccagttacggattcaaatcaacgagcagatctacttctcccgtcgcgttcgttttgtggaagggaaaccgctgatgctggaagacagctatatgccggtaaaactgttccgtaatctttcgctgcaacatctggaagggtcgaagtttgaatatattgaacaagagtgcgggattttgattggcggtaattatgaaagcctgacgccagtgctcgccgatagactgctggcgcggcaaatgaaggtagcggaacacacgccactgctgcggatcacctcgttgtcatatagcgagagcggggagtttttgaattattcagtgatgttcagaaatgccagcgaataccaggtggagtaccatttacggcgactccacccggaaaagagttaaccgatactccagaagagcaccgccagtaattggggggtgataatgcgcaggaacattaccaacggatagacagtggcgtaagagagcgccgccgcaccgctggttggatgaagattattagcaaacgccagcgccggaggatcggtcatggaacctgccagcatcccgcacatggtcaggtaattcattttggctaacatccgcgccagaatgccaacagtaatcagcggaacggcggtgatcagggcaccataaccaatccagcttagcccttcgccattgaccagggtattcacaaaatccccaccagatttcagaccaacgaccgagaggaacagcacgatccccagctcccgcagcgcgaggttggcgcttggcggcataaaccagtacagcttgccgatactgccgatacgcccgaggatcaacgccataatcagcggtccgcccgccagccccagtttcaacgcggccgggaatcctggcacaaagacgggaatagaacctaacaatacgcctagcccgatgccaataaacactggcagcatctgaacctgttgcagtttttgctgcgcattccccagcacattggcaacggcatcaattgcggacggacgccccaccagattgaggatatcgccgaactgcaggctgatatcgccactggcgaccagttcgaccccggcacggttcaggcgcgagataacaacgtcatagcgttctttaaagtgcaggtcgcgaatacgttttccgagcacgttttcattggtgaccaccacacgctcgacgcgcaaatcagtgcctttcgtggacagcgaagtatcgacctcctgaccaatcaccagttgcgcattatgtaaatccgctggctgacccaccagatgcagcaaatcgcccagttggataatggtatctggcgaaggaacttttagggtttcttcgcgtttcagacgcgagcagataattttgtcgccgttgagaatcggtacatctttaatggctaaatcatgcaggttagggttctcaacgcgaatattgatagtcttgatcagcgcgccgccattggtgcgtgaagactcgtgctgctgagcttctgtctcgacattgacgcggaaaataacccgcaacatccacatggtgaacaaaatcccgcaaatgccgaatggatacgccatcgcgtaactcatccccatctgatcgaccatttccattggtgtacccaggtcgcgcaaaatctgctgccctgcccccagcgctggcgtattggtaaccgcaccggagaaaatccccagcactaccggcagtggaatatcaaacagtttatgcaggatggcggtaaccagaccaccgatgatgacgatcagaacagcaaacaggttgaggcgtaatccggagacgcgcaatgaggcaaagaagcccggccctacctgaatcccgatagtataaacgaacaggatcaggccaaattcctgaataacatgcagcatatcgctacttaatgtcatccccgcctgagaaacaaaatggccgacgatgatcccaccaaacagcacgccgccaatacctaatcctatgccgcgaaatttgacgttgccgataaacaaaccgacgactgccaccaaagccagaatactgaccgttaatgctatatcactcatcgtccatttctcttgagataacattttaattgctacggattatggctgaatcggtgaagcagatttgccttatagcgcacattatcacgggaaagaacgtgccgaaatatcttaaacagtcgaaatttaacgcattgttgagtaagtaagacaaaaaaagccccaccagaatggcggggcaaagagaatagctagttagctatttaacgcgggacgttcgctgatagcgatacgctgcgctgcgatgggttcaggctcattacgaattaaatcaatatgcagtaaaccgtttacgaaggttgcgccagagacttccatattttcagccagcgtaaagctcaggctaaatggctgattcataagcccttgatgcagccattttttctcttcttttggctgctccggcgtgccttttacgctcaggcgcgtaccttccagttgaatctctaaatcttcctgacggaaacctgccagcgcaagggtaatgcggtagtggttatcgtcgcttttctcaatgttgtacggcgggaagctctggctttcaccggcgttttgcagtgcgttggccagtttgtcaaaaccgatccattgacgcatcagtggggataaatcgaagttacgcatagtcatttctccttctaagaagcgagtaagtacctgcaaatccgaagattcgcatatgctccctgacggcgagcatggagatgtcaggccgcgccaggcggccttagggaattagttgatttcgatacggcgcggttttttcgcttccggaatcacgcgttcgagatcgatatacagcaaaccatttaccaggttagcaccacgaacatgaatgttctcagctaactggaatttgcgttcaaagttgcgttcagcgatgccctggtacagataggtgcgctctttttgttcgtcggcgtgagcacctttcaccaccagcagattatcctgggcggtaatttccagttcgctctcagcaaaaccagccacagcgatagcaatgcggtaatggttttcgtctaccagttcaacgttatacggagggtagccgccattactctggctctggttgttttctaagtggttaaacaaacggtcaaatccaatagcagaacggtaaagcggggataaatcaaagttacgcataatcaatagctcctgaaatcagcgagaatgtaagaccttccacaatggacaggtcaggtagccagaacacccatcaggcgcgtcctcatcggctacgatgtaaaaatgggtctggaaatgaacttttcaagccttatcagcggacttttttttgcagtttatggtctattgcatagactgagggggcaacacgaaacgttaaagtgcgatagccgccacagtgcgacgtaatgatgatgttattttcagcaagggatcgctataactcatcaggccaacacccacgatcaacagatgaatttattatgataagaaatgtgttgttagcgttcatgatatgcagcggaatgacattactcggaggatgctccagcgtgatgtcccataccggagggaaagaaggaacgtatcccggcacccgcgccagcgcaaccatgattggcgacgatgaaaccaactggggcactaagtcgctggcgattctcgatatgccgtttaccgctgtgatggacacgcttttactgccgtgggatgtgttccgcaaagacagctcggtgcgctcgcgcgttgaaaaaagcgaagccaacgcgcaagccaccaatgcggttattccaccggccagaatgcctgataactgatttagcgatcagtttcggtgatccacagctggccgccttccatccacgccagccactgaccatccggcgagaagaccacggcgtccgcagaaggtgaattggcgtggtgttcggttaaatactcaacctcgccgctttgcgcatgggcacaagcaattcgattatccagcacaaagcccaaccattctcctgacggatgccagttaaatgcagactgaatatccgttttgttatgggttaactggcgcggctcgccgccctgtggcgagataagccacagttgcacaatgccgttatcatctcgcattaaaaacgcgatttgtgtaccctgcggattacagcgcacccagtggcgcgggacgttgactaaccccggataagcccgatggtgggtaaaggttaaacgtcgctgcacgacgccacgcggtggcgcgggcagggttgtttccgttccgcttaacggcgcatcacctgccgctttccagccagcttcatcttgcggtaactcaacgataaacagctccggcactttctcgccctttggcgaaagtgtgtcgccaataaatgccagcgcgtgatttcctacccatccttcttcataagcacgattgatttcatcactgccaggctgtggcgtgggcgtggttttgctcaccagcacgcaccagtggctaccgctgtattcacgcggatgctgcttttgtacgttgaccgggccaaacggcgcagcaacaccgacgtttcgcaaatccagcgccggatcgagttcatgcattacatggtcgttataggtaaagctcaccctttcaccgttcgggctaaagacatgcacatggctgccgccgcgcagcactcctggcgtatacggcgcggtaatatccatcgcatcaaggttactcatcttgccgccttcaacaatcactccgcgccgatgatggaagtcgtaatgccatgtttcatcaggattttccgggccgtggatgaaaacatatttctctgacttcggatgaacggtcaccacgccgacgtgtgcgccctgtgacgcgcgatagataacctcgacctcgccggtatggatattcacacgctcaatggtctcgccggtaaacgacgcgccagaaggacgcacgtcaaataccagccactggctgtcgggcgtccaggtattggtattggtgagcaggtgattacggggagcaaaggttatctgtttcatggcgcggtcctgatacaaaacgggtcccgccatcatacttcacaaggacttcactttcagacaatagtcttttgccatcgtgatgaatgtgagtgaaaagatggaacatttcgacgtggcgattattggcctcggcccggcaggatcggcgttggcacgaaagttagcaggcaaaatgcaggtgatcgcgctggataaaaagcaccagtgtggtactgaaggtttcagcaaaccctgcggcggtctgctggcaccggacgcgcagcgatcttttattcgcgatgggctgacgcttcctgtcgatgtgatcgctaatccgcagattttcagcgtcaaaaccgtcgacgtcaccgcatcgctcacgcgtaactaccagcgaagctatatcaatattaatcgccatgctttcgacttgtggatgaaatcgctgatccccgccagcgttgaggtttatcacgacagcctgtgccgaaaaatctggcgtgaggatgataaatggcatgtcatttttcgtgcagacggctgggagcaacatattaccgcccgctatctggtcggtgccgatggcgcaaactcgatggtgcggcgacatctctacccggatcatcaaatccgtaaatatgtcgctatccagcagtggttcgcggagaaacatccggtgccgttctactcctgcatctttgataattcgataactaactgttattcatggagtatcagcaaagacggttattttatctttggcggtgcctatccaatgaaagacggtcagacgcgtttcacgacgctgaaagagaaaatgagcgcctttcagttccagtttggtaagacggtgaaaagcgaaaaatgcacggtgctgtttccctcgcgctggcaggattttgtctgcggtaaggacaacgcctttctgattggtgaagcggcgggatttatcagcgccagctcgctggaggggattagctatgcgctggatagcacagacattctgcgttcggtgttactgaagcagccagagaagctcaataccgcttactggcgcgccacccgcaaactgcgtttaaaactcttcggcaagatagtaaaaagccgatgcctgaccgcaccggctttaagaaagtggattatgcgcagtggtgtggcacatattccacagttgaaggattagccaacgcgcttcacatcgcccaccagcaggatataagagagcgcgccaatcaacgcgacggcggagatataaaccagtgcaggtgcgaaaccgtaaccctgcgccaggtaccccaccaccagcggaacggtgatgccgcccagaccaccggcgaagttaaacacgccgccggttaaaccaatcaggcgcatcggtgccagagaagaaaccagcgaccaggtaatcgaagcaaaaccgttaccgaagaatgccagcgccatcaggcacataatcatcatcggatcgttagtgtagttagcgcccataatgcaggtggagatcagcaagccgcagataatcggcgttttacgcgcaaagcccagtgaaaagcccttacgtaccagcagatccgctacccagccagagagcaggacgccgacaaacgccgcgaggaatggcaccgtggtcataaagcctgctttcagcgccgtgattcctttttcctgggttaaatagttcgggaaccaggttaagaaaaaccacagtgtagaagccaccgcaaattgcccaagataaacgccgatcagtttacgatggaacaccagtttccagtctttggctgttaacggctgacgcgcctctttcttcaccggcgcatcaccatccaccagaccgccgccatcacgaatgtaatccagttcagctttgctgatacctttggtcaggcgcggcggctgataaaccttaaaccaaatcagcgaccagataatgccgataccaccagtgacaatgaacacccagtgccagctcaacatctcctgaatccagatcagcagcggcgtcagaaacgccagaccgacaaactgaccagacgtataaaaaccaacggcagaagcgcgttcatgttccgggaaccagctggtcaccatccggttattggtcgggaaagcaggcgcttcgaaaataccggttatcgcgcgcagaccaattaatgacattaagcccgtggcaaagccctggaataaagtcgccactgaccagccaaatatcgcaataaaataagtcacgcgagaacctacgcgatctaaaaaccaaccgccggggatctgacatagcgtataaagccaggcgaaggccgaaaatacatagcccatttccgctttggtaatgccgaactcttcctgaatatgggcggaagccacggccaggttggcgcggtcgacataacaaatgactaccgtaataaagatcatcaccagcgtcagataacgccgacgccccggctttgctgcattaacgggaatatccatagcgagctttctccagattttgggcatagcgaagccgctcaccatgccctgtaatttacagagggttatatttttgtattgctgttttagtgcccgatgaggggcttacgtggcaggaattaccactctgctacgctgttatcttcatgacgccagagcggattacgccagtccggggcatttttactgaactcaatcactttagcttcgtcgatttccacgcctaagcccggtttcgttaacggtttaaagaagccgccgaccatgctgaagtcttctttgtttttcacaaagtcgagtaactccgcgcctttgttgtaatgaattcccatactttgttcctgaagtacggcgttataggaaacaaagtcgatatgcaggcaagccgccagtgcaatcggtccgagcggacagtgcggcgcaagggtcacgtcataggcttctgccattccggcgattttgtagcattcggtaataccgcccgcgtgggagagatccggttgcagaatcgaaataccacctgcctccagcacgcgtttaaaatcgaagcgtgagaacatgcgttcacccgccgccagtggaatatgcgtttgtgccgccagtttcgggtagtattcggcttgttccgccagcaccggctcctcaataaacagcgggcgatacggctccagttctttaatcagcactttcgccatcggcgcgctgacgcgaccgtggaaatcaagaccaaactcaatctgattgccaaaagcttcacgaatttgtgccacggtgttaaccgccgcatctaccgcgcgggagttatcaattagccccagttcttcacaaccgttcagtttgaaggtatcgaagccgatttcgcgtagcgttttaatgccgtcgataacatccgccggacgatcgccgccaacccaactgtaggctttaattttgtcgcgaaccaggccgcccatcagttgccagaccggcgcattcagcactttacctttgatatcccataacgcctggtcaatcccggcgatggcgctcatcaggatcggaccgccgcgatagaatccggcgcgatacatcacttgccataagtcattgatgcgcgatggatcctgaccaatcaaatagtcacccagctcgtgaactgccgcttccaccgtacgggcgcggccttcgatcacgggctcgccccaaccgaccacgccttcatcggtttcaattttcaggaacatccagcggggaggtaaacgatacgtggtaattttggtgattttcattgcactgcctctcgatacgccttaacaaatgctgctgcctgctgcgcggtgcgctctacggattgcccggcgcgatagagatcgctgcctaagcccgcccctgcacaacctgcgtctatccactgcgccaggttttctggcgtcacgccgccaacggcaaagactgcgatgtccgatggcaataccgcttttaacgctttgatgtattgcggaccaaaagccgatgacggaaatattttcagcgcctgcgcgcccgcttcgagcgcggtaaaggcttcggtcgccgtcgcgcagccggggcagacggtcatgccgtagcccaccgcacggcggatcacttcactatggatattgggcgtaacgatgagctgacagcccatcctggcgagcgcatcgacctgttcaggtttcagtaccgtacctgcgccaatcaacgccttgtcgccgtacgcatcaacgatggcgggaatgctttgctcccattgtggggaattcagcgggatttcaaccgcgtcgaacccggcgtcaatcaccgcgccaacatgcgccagcgcctcgtcgggcgtaataccgcgcaaaatggcgatcagcgggagtttagtttgccactgcatgagcgatgctccttataccagcctgaaatgccgtgtcgcccgccaccgccgtcacgtcgcaacccatcgcctgaaaggcttgctggtagcgcgcggtcagcgatgttccggcgacaagggtgatggcgtgttgatgggccacatagtcgcgcatactggcgacctctgcgccaatcaacaaaccagagagaaattcgctgacctgttcgcggggaagtgttcccagcacatgcgaggcgcgaacttcaaaaagctgcggcaatatggcgggcgtattaagaccacgctcaaggccagctgtgaaggcatcggcagagttttcctgcggcggcaaacctgcgccaatcaatgagtgatttaacagtaaatgatgtaattcaccggtcatcacggtgcgaaaatcgttgatttgctggctatcggcctgcacccatttgcaatgggttccgggcatgacataaagagaggaaggagccagagctcgcgcgccgatcaattgtgtttcttcgccgcgcatcacattgtggttatcgtcatgagagacacataatccgggaataatccagatattgtcgccaactgacgttaattgttcgccaatagacgaaaaacaggcaggaacagataaatacggtgcaactttccagccgacgttgctgccaaccattcctgccattaccactggcgttttctcttcacgccagtcggtcgtgacttctgctaacaccgcagccggagattttccgttcaggcgcgtgacgcctgcttctgattgcctgctctccaggcagtggtcgccctgataaagccaggcgcgcagattggtcgatccccagtcaattgcgatgtagcgagctgtcatgtgatttcctttaaccttcgtgtcgagctggcgatcatggtaagcgccgcctgctctgccgcatcgccgtcctgatgtcgtatcgcatcgaacagcgccttatgttcctggagcgtttgcggcatgttggcctcatcgcccatccaggttcgttcaaaaaccgcccgctgcagcgaactgatcgcaatgctaagttgctgtaacaccgggttatgcaccgactgcagcaccgcctcgtggtagcgaatatccgcttcgttaaacgcttcgcggtcctgattgttggcaatcatctcgttcagcgccgattcaatctgcgccagatcgctggaagtcgcgcgctctgctgcccaacgggcaatcgccggttccaccagatttcgcacttcgctcatggcactgataagccgtgggtcgtagtcattttccagcacccattgcagtacgtcagtgtcgaggtaattccactggttacgcggtgccacaaacgccccgcgataacgtttcatttcaatcagccgcttcgccatcagcgaacggaacacctcacggatgatgttgcgcgaggttgcaaactcctcacagagttccgcctcagccggaagcggcgagcctggcacgtatttgccgtgaacgatctgtttacccagcgtaatgacaatgcgatcggttttattgagagtcatggagagtccttgtgctctgtatgttcttctctactttaccccgatcgatgcataacgcggcaactttgtagtaccagcgtgatgacgttcgcgtttgccgtgcgtgtaatgtagtacaaacttatattgttgtactacaatttagatcacaaaaagaacaatgcataaaaaaatgacatgcgtcgggcagaaatctgaaaagggatatcaggcgctaaacaggagggaaagaagagtatgctttcaacggcttagctactcgtttaaaggattaatcatgaagttgaattttaagggattttttaaggctgccggtttattcccactggcgctgatgctttcaggctgtatctcgtatgctctggtttcccataccgcaaagggtagttcaggaaagtatcaatcgcagtcagacaccatcactgggctatcgcaggcaaaagatagtaatggaacaaaaggctatgtttttgtaggggaatcgctggattaccttatcactgatggtgccgatgacatcgttaagatgctcaatgatccagcacttaaccggcacaatattcaggttgccgatgacgcaagatttgttttaaatgcggggaaaaagaaatttaccggcacaatatcgctttactactactggaataacgaagaagaaaaggcactggcaacgcattatggttttgcctgtggtgttcaacactgtaccaggtcactggaaaacctaaaaggcacaatccatgagaaaaataaaaacatggattactcaaaggtgatggcgttctaccatccatttaaagtgcgattttatgaatactattcacccagaggcattccggatggtgtttccgcagcattactgccagtgactgttacgctggacatcattactgcaccgctgcaatttctggttgtatatgcagtaaaccaataatcagtaagcgggcaaacgcgtttatgctgtttgcccgcccacagattaattcagcacatacttctcaatagcaaacgccacgccatcttcaaggttagatttggtgacaaagttcgccacttctttcactgaaggaatagcgttatccatcgccacaccgacgcctgcatattcaatcattgcgatatcgttttcctgatcgccaatcgccatgatttcttccggtttaatacctaacacgtcggccagtgatttcacccccgtacctttgttaacgcgtttatcgaggatttcgaggaagtacggcgcacttttcagcacggtatatttctctttcacttcctgcggaatacgcgcgatagcctggtcgaggatggcgggttcatcaatcatcatcactttcaggaactgggtattggggtccattttctccgcttcgcagaacaccagcggaatggtggcaacgaaggattcatgcaccgtgtagtagctgatatcacggttggcggtgtacagcgtggtgcggtccagggcgtggaaatgagaaccgacttcgcgagagagtttttccaggaaacgatagtcgtcatagctgagagcagtttgcgccacggtgctaccatcagcggccttctgtaccagcgcgccgttataagtaatgcagtagtcgcccggctgttccatatgcagctctttcaggtagttgtgcacacctgcatacgggcgacccgtcgttagcacgacattcacgccacgggcgcgagctgcggcaatcgcatttttaacggcgggtgaaatggtgtgatcgggcagcagaagggtgccatccatatcgatagcaatgagtttaatagccatgagttccccaggtagattggttcctgacccatgctaacgcgattccgctcaaaaatcagtacaacacccgagggaaaagggggatgcaacgcgcgttgcgtgctccctttttgcttagcggaagagtttccctttcagcagttccatgcctgcggaaagcagatcgttattggcttgtggtgacacttcaccttgcggtgagagcgcatcaataatcttcggcaattgttctgccagtaaactggaagctgtactggtatccacgccaagtttttgcccgagatcggacaccgcatttgtgccgagcgccgattccagttgctcgccactaaccgattgattgccctgttgattactcagccaggttgagagaatggcccctaagccgccactttgcagtttttccagcagcacctgaatgccgccctgctcctcaacccaacttaaaatagcctgatatttccccgcatcgcctttcagaaaggcaccgacaacttcatcaaaaagccccatgataatcacctgtaaagcgttacgtgttgacccaaaaagtatagatttgcgggatgataattgcggattgcagaaataaaaagggcggagatgatctccgcccttttcttatagcttcttgccggatgcggcgtgaacgccttatccggcctacaaaatcatgaaaattcaatacattgcaagattttcgtaggcctgataagcgtagcgcatcaggcacgctcgcatggttagcgccattaaatatcgatattcgccgctttcagggcgttctcttcaataaacgcacggcgcggttcaacggcgtcgcccatcagcgtggtgaacaactggtcggcagcaatcgcatctttaacggtaacgcgcagcatacgacgactttccgggtccatagtggtttcccacagctgttccgggttcatctcgcccagacctttataacgctggatggagaggccgcgacgggactctttcaccagccagtccagcgcctgctcgaagctggctaccggctgacgacgctcgccacgttcgataaacgcatcttcttccagcaagccacgcagtttctcacccagcgtgcagatacgacgatattcgccaccggtgataaactcgtgatccagcggatagtcagtatccacaccgtgggtacgcacgcgaacaatcggctcgaacaggttttgctcagcattggtgtgaacatcaaacttccactggctgccgtgctgttctttgtcgttcagttcgctgaccagcgcgttcacccagcgggtaacggtctgctcatcagaaaggtcagcttccgtcaacgtcggctgatagataagctctttcagcattgctttcggataacgacgctccatacgattgatcattttctgcgtcgcgttgtactcagataccagtttctctaacgcttcgccagccaatgccggtgcactggcgttggtgtgcagcgttgcgccgtccagcgcgatagagatctggtactgatccatcgcttcgtcgtctttaatgtactgttcctgcttgcctttcttcactttgtacagcggcggctgagcgatgtagacgtgaccgcgttcaacgatttccggcatctgacgatagaagaaggtcaacagcagcgtacgaatgtgcgagccgtcgacgtccgcatcggtcatgatgatgatgctgtgataacgcagtttgtccgggttgtactcgtcacgaccgataccacagccaagcgcggtgataagcgtcgccacttcctgagaagagagcatcttatcgaagcgcgctttctcgacgttgaggattttacccttcagcggcagaatcgcctggttcttgcggttacgcccctgcttcgcagagccgcccgcggagtccccttccaccaggtacagttcggaaagcgccggatcgcgttcctggcagtctgccagtttgcccggcaggcccgctaagtcgagcgcacctttacggcgggtcatttcacgcgcgcgacgcgccgcttcacgggcacgggcagcatcgataattttgccaaccacgattttcgcgtcggttgggttttccagcaggtattctgccagcagttcgttcatctgctgttcaaccgccgatttcacctcagaagaaaccagtttgtctttggtctgggaggagaatttcgggtccggcactttcacggaaacgaccgcaatcaggccttcacgcgcatcgtcaccggtggcgctgactttggcttttttgctgtagccttctttgtccatgtaggcgttcagggtacgggtcatcgccgcacggaagcctgccaggtgagtaccgccgtcacgctgcggaatgttgttggtaaagcagtagatgttttcctggaagccatcgttccactgcaacgccacttcgacgccaataccgtctttttcagtggagaagtagaagatattcgggtggatcggcgttttgttcttgttcagatattcaacgaacgccttgatgccgccttcatagtggaagtggtcttctttgccgtcgcgcttgtcgcgcagacgaatggaaacgccggagttgaggaacgacaactcacgcagacgtttcgccagaatttcatattcgaactcggtcacattggtgaaggtttcgaggctgggccagaaacgcaccatggtgccggttttttcagtctcgccggtaaccgccagcggggcctgcggtacaccgtgttcgtagatctgacggtgaattttaccctcgcgctggataaccagctccagtttttgcgacagggcgtttactaccgaaacaccaacgccgtgcagaccgccggacactttataggagttatcgtcaaatttaccgcctgcgtgcagaacggtcatgatcacttccgccgccgatacgccctcttccgggtgaataccggtcggaatgccgcgcccgtcatcctgtacagagacagagttatcggcgtgaatggtgacgataatttctttacagtgacccgcgagcgcttcgtcgatagcgttatctaccacctcgaataccatgtggtgcagaccggtgccgtcatccgtgtcgccgatatacatacccgggcgcttacgcaccgcatccagccctttcaggactttgatactggaggagtcataagaattcgacatcaacgtttctcgctcatttatacttgggttaatccgttattttacccttttccacggtaaacatcttcgaattttcgtccgacatgtctataacgtgttcagcactgatcgcgctgacaaagacctgtgattgcgtcgcttttaagcggctggcaagcagcccgcgacgctcatcatcaagctcagaggcaaaatcatctatcaggtagagacaccgccgcccgctttcacgggtgaggaactctccttgcgccagacgtaaggcgcacatcaacagcttaagctgcccacgcgataaggtatcttccaccggcgcaccgtcggcgcgaatgcgtaagtccgctttgtgcgggccgtgcgcggtgtaggttagctggcgatcgcgttcaaaattacgttccagcacctcagcatattctgtctctttctcccagccgcgctggaaagagaaagtcagagaaaactcagggagaaattgcttacaggtatcagccatatcggccgcgataccggcgctatactccgcgcgccaggtgctgatttgctccgccagcgggatcagctctttatcccacgggcggagctgttcgtaacgtgtcacctggcgcagcgccgcattgcgctgcttgagcaatcgcttgagattgctccaggcggtgaaaaatccgggttcgttgtgaaagcatccccagtcgaggaatgctcttctgtatttggggccgccgttgagtaaagtaaacccttctggcgttatcaactgcattggcatcaggtgcgccagttccgcgaccttatgcccgtctgtaccgtcgatgcggactttgctgtcgccctgtttgtctttggttaagccaatcgctgtctcgcgctcttcgccctgtaatcgcccgtggagaacaaacgcctcctgctcatggcgaatgacgcgaccaatctgcaaactgcgaaacgcccgaccatggccgagcgtatagatggcttccagcacgctggttttgccactgccgttggcacctaccagaaagttaaagccgggagataaggcgagatccgcggtttcaatgttgcggaaatcgcggatcaacaagcgggtgagggacattacagtctcattggcatgacaacataagccgcgctctggctggccgcatcttcaatctgcacgctggaaaccgaatcggtcagcatcatgcggacgttttcgcatttcagcgcgttcagaacatccagcacataactgacgttgaagccgatttccatctccgcaccgctataggtaacgtcgaggatctcttccgcttcttcctgttccgggttgttggcggtgattttcagctggttttcgctgacataaagacgtacgccgcggaatttctcgttagagagaatcgccgcgcgagcaaacgcctgcttgagcagatcgcagccagcttccagatgtttgtccgggttcttcggcagaacgcggcgataatccgggaagcgaccatccaccagtttggaggtgaagataaagtcgccaacgtgggcgcgaatgttgttgctgccaatctgtacgcgcagcggattgtcaccgccgtcgagcatacgcatcagttcaatcacgcctttacgcggtacgatcaccgaatggcttggcaaagattgaccaattggcattgaacagaccgccagacggtggccgtcggttgccacggtgcgcagttcttcaccttcggtttcaaacagcataccatttaagtaatagcgaacgtcctgatgcgccatagaaaactgggtcgcttcaatcagacgcttcatcgttgcctgcggcagggtaaattcgacttcactctgccagtcatcgaggttcgggaaatccgccgctggcagggtagacagcgaaaaacggctacgcccggagcgtaccagcatccgttcaccttccagctgcacggcaatttccgcgccttcaggcagaccacggcagatatcaaagaatttgcgcgccggaacggtcgtcgctcctggctcgtgtggctgaaccagcgcaacacgtgccaccatttccatctcgagatcagtaccggtcagcgacaacgtaccgtcagcaacctgtaacagcagattaccgagaatcggtagcgtaggacgaccacctaacggaccgctcacctgttgtagcggttttaataaatgctcacgttctacggtaaatttcataggtttacgatgacaatgttctgattaaatttgaaaaatcttctttgatatcgtggctctcttcacgcaactgctcgatcttacggcaggcatgaagcaccgtcgtgtggtcacggccaccaaacgcatcgccaatctccggcagactgtggttagtcagctctttcgccagcgccatcgccatctggcgcggacgcgccaccgagcgggatcgacgcttggaaaggagatccgcgactttgatcttgtagtactccgccaccgtcttctgaatattgtcgatggtgaccagtttttcctgcaatgccagcaagtcgcgcagcgcctcacgcacgaagtcgatggtgatcgcccgtccggtaaagttggcattggcaatgacgcggttcagcgccccttccagctcacgtacgttagatcgtagacgcttggcgataaagaacgccacttcgcccggcaaacgaatgtcgttttcgtcggcctttttcatcaggatcgccacacgggtttccagctctggcggttcgatcgccacagtcagtccccaaccgaagcgggatttcaaacgatcctcaacgccgttgatctctttcggatagcgatccgaggtgagaatgatctgttgattaccttccagcagggcgttgaaggtgtggaaaaactcttcctgagatcgttctttattagcaaaaaactgaatatcgtcgatcagcagtgcatctacggaacggtagtagcgtttaaactcttcgatcgcgttgttttgcagggctttaaccatgtcctgaacaaagcgctcggagtgcatataaaccactttggcattcggcttgcgcgccataatgccgttacccaccgcatgcagcaggtgagttttacccagacccgtgccgccataaaggaacaacgggttataggcaccgccagggttatccgccacctggcgagccgccgcgcgcgccagttggttagatttaccttcaacgaagttatcaaacgtgtgtttgacgtttacgttagaacgataggtcggttctgccggggccgggacgttatcccaacctgagcgcgtagaaggcgcagcacgttgcggctgcgtttgcgccacctgtgcaggggccgcgacgttgctcgtcactgccgcttgtggcgtttgcgtcaccggtttggtgccgacttcaaaacgcagctgtggggcatccgctccgcagaaactggttagcagtccattgatattattaaggtacttgtcccgtacccaatcgaggacaaaacggtttggcgcgtacagggccagcgtgttatcgctcagttccgcctgcaatgggcgtatccacatactgaattctgtggctggtaactcatcctgcaatcgggcaagacactgctgccaaagcgaaagtgacacggcggactccactcgaacaaaagtcgataatgactaaggctgaaacattcatgattgttgacgtacgtcgaaaagaccctgcttgagggtgacgcacgaaccgctgtctgcggttatatgcccgatcaagatcctgcaaaacgatcgggaccgcggatcatagcctaaactgcgcaagagatcttctgtttctcacagattttcccgatttatccacaggactttccagaactcgctaagtgtaaacgatcctgccgcgaggcgggcacgatttacgccgcatattggaaaatttaatgaccatagacaaaaattggcttaatcgatctaataaagatccaggacgatccttgcgctttacccatcagcccgtataatcctccacccggcgcgccatgctggtttccactggtgtgaggtcgtacattttccctgcgaaaaggtgcggaaaagcgcggtaaataaggaaagagaattgactccggagtgtacaattattacaatccggcctctttaatcacccatggcttcggtgtccatcgtttcatttttcggcggatatccaataaagccattgaatttattcaagtttaggtagaaatcgccatgaaacgcacttttcaaccgtctgtactgaagcgcaaccgttctcacggcttccgtgctcgtatggctactaaaaatggtcgtcaggttctggcacgtcgtcgtgctaaaggccgcgctcgtctgaccgtttctaagtaataaagctaacccctgagtggttaagctcgcatttcccagggagttacgcttgttaactcccagtcaattcacattcgtcttccagcagccacaacgggctggcacgccgcaaattaccattctcggccgcctgaattcgctggggcatccccgtatcggtcttacagtcgccaagaaaaacgttcgacgcgcccatgaacgcaatcggattaaacgtctgacgcgtgaaagcttccgtctgcgccaacatgaactcccggctatggatttcgtggtggtggcgaaaaaaggggttgccgacctcgataaccgtgctctctcggaagcgttggaaaaattatggcgccgccactgtcgcctggctcgcgggtcctgatagccctcattcgggtctatcaacgcctgattagtccgctactcgggccgcattgtcgtttcactccaacctgttcaagctacggaattgaggcattgcgcaggtttggagtgataaaaggcagttggttgacggtgaaacgcgtattaaaatgccaccctttacaccctggtggtgacgatcccgtcccgcccggaccatttgataccagagaacactaacgatggattcgcaacgcaatcttttagtcatcgctttgctgttcgtgtctttcatgatctggcaagcctgggagcaggataaaaacccgcaacctcaggcccaacagaccacgcagacaacgaccaccgcagcgggtagcgccgccgaccagggcgtaccggccagtggccaggggaaactgatctcggttaagaccgacgtgcttgatctgaccatcaacacccgtggtggtgatgttgagcaagctctgctgcctgcttacccgaaagagctgaactctacccagccgttccagctgttggaaacttcaccgcagtttatttatcaggcacagagcggtctgaccggtcgtgatggcccggataacccggctaacggcccgcgtccgctgtataacgttgaaaaagacgcttatgtgctggctgaaggtcaaaacgaactgcaggtgccgatgacgtataccgacgcggcaggcaacacgtttaccaaaacgtttgtcctgaaacgtggtgattacgctgtcaacgtcaactacaacgtgcagaacgctggcgagaaaccgctggaaatctcctcgtttggtcagttgaagcaatccatcactctgccaccgcatctcgataccggaagcagcaacttcgcactgcacaccttccgtggcgcggcgtactccacgcctgacgagaagtatgagaaatacaagttcgataccattgccgataacgaaaacctgaacatctcttcgaaaggtggttgggtggcgatgctgcaacagtatttcgcgacggcgtggatcccgcataacgacggtaccaacaacttctataccgctaatctgggtaacggcatcgccgctatcggctataaatctcagccggtactggttcagcctggtcagactggcgcgatgaacagcaccctgtgggttggcccggaaatccaggacaaaatggcagctgttgctccgcacctggatctgaccgttgattacggttggttgtggttcatctctcagccgctgttcaaactgctgaaatggatccatagctttgtgggtaactggggcttctccattatcatcatcacctttatcgttcgtggcatcatgtacccgctgaccaaagcgcagtacacctccatggcgaagatgcgtatgttgcagccgaagattcaggcaatgcgtgagcgtctgggcgatgacaaacagcgtatcagccaggaaatgatggcgctgtacaaagctgagaaggttaacccgctgggcggctgcttcccgctgctgatccagatgccaatcttcctggcgttgtactacatgctgatgggttccgttgaactgcgtcaggcaccgtttgcactgtggatccacgacctgtcggcacaggacccgtactacatcctgccgatcctgatgggcgtaacgatgttcttcattcagaagatgtcgccgaccacagtgaccgacccgatgcagcagaagatcatgacctttatgccggtcatcttcaccgtgttcttcctgtggttcccgtcaggtctggtgctgtactatatcgtcagcaacctggtaaccattattcagcagcagctgatttaccgtggtctggaaaaacgtggcctgcatagccgcgagaagaaaaaatcctgattcggtgagttttcgctaaaataagggcggtcagttgaccgccttttttcttttcgtagggcggataagcaccgcgcatccgccacacaaagcaacaggaacatcatgagcgataatgacactatcgtagcccaggccacgcctccgggacgtggcggcgttggcatcctgcgcatctccggcttcaaagcccgtgaagttgccgaaaccgtgctgggtaaactgcctaagccgcgctacgccgattatcttccgtttaaagacgccgacggcagcgtgctcgatcaggggattgcgctatggttccctggcccgaactcgttcaccggcgaagatgtgctggaactgcaaggtcatggcggtccggtgatcctcgacctgctgttaaaacgcattctgaccattcccggcctgcggattgctcgccctggtgagttttccgaacgcgcgtttcttaacgataaacttgacttagcccaggccgaggcgattgccgatcttatcgacgccagttcggaacaggcggcccgttcggcacttaactcgctgcaaggcgcattctccgcacgggttaatcatctggtagaagccctcacccacttgcgcatttacgtcgaagcggcaattgatttccccgatgaagagatcgatttcctctccgacggaaaaattgaagcccagctcaatgacgttattgccgatcttgatgcagtgcgtgctgaagcacgtcagggtagtttgttgcgcgaagggatgaaagtggtgattgccggacgtcctaacgccggtaaatcgagcctgttaaacgcgctggcggggcgtgaagcggcaatcgtaaccgatatcgccggaactacgcgtgacgtgctgcgtgagcatatccacattgacggaatgccgctgcatatcatcgataccgccgggctacgtgaagccagtgacgaagtagaacgtattggtatcgagcgcgcgtggcaggaaattgaacaggccgaccgcgtgctgtttatggtcgatggcaccacaacagacgccgtggatccggcagagatctggccggaatttattgcccgtctgccagcgaaactgccgatcaccgtggtgcgcaataaagccgatatcaccggcgaaacgctgggaatgagtgaagtgaacggtcacgcgttaattcgtctctcggcaaggactggtgaaggcgtggacgtgctgcgtaaccatctcaaacagagcatgggctttgacaccaacatggaaggcggcttcctggcgcgtcgtcgccacctacaggcgctggaacaggcagcggaacatctacaacagggcaaagcgcaactgttgggagcctgggcaggtgaactgctggcggaagagttgcgtctggcacagcagaacttaagcgaaatcaccggggaatttacttcagacgacctgctggggcggattttctccagcttctgtattggtaagtaaccgcgcttacgaagccgcattctgactgtcagatgcggcttcgcttcattgttaccactcctgttattcctcaaccctttttttaaacattaaaattcttacgtaatttataatctttaaaaaaagcatttaatattgctccccgaacgattgtgattcgattcacatttaaacaatttcagaatagacaaaaactctgagtgtaataatgtagcctcgtgtcttgcgaggataagtgcattatgaatatcttacatatatgtgtgacctcaaaatggttcaatattgacaacaaaattgtcgatcaccgcccttgatttgcccttctgtagccatcaccagagccaaaccgattagattcaatgtgatctatttgtttgctatatcttaattttgccttttgcaaaggtcatctctcgtttatttacttgttttagtaaatgatggtgcttgcatatatatctggcgaattaatcggtatagcagatgtaatattcacagggatcactgtaattaaaataaatgaaggattatgtaatggaaaactttaaacatctccctgaaccgttccgcattcgtgttattgagccagtaaaacgtaccactcgcgcttatcgtgaagaggcaattattaaatccggtatgaacccgttcctgctggatagcgaagatgtgtttatcgatttactgaccgacagcggcaccggggcggtgacgcagagcatgcaggctgcgatgatgcgcggcgacgaagcttacagcggcagtcgtagctactatgcgttagccgagtcagtgaaaaatatctttggttatcaatacaccattccgactcaccagggccgtggcgcagagcaaatctatattccggtactgattaaaaaacgcgagcaggaaaaaggcctggatcgcagcaaaatggtggcgttctctaactatttctttgataccacgcagggccatagccagatcaacggctgtaccgtgcgtaacgtctatatcaaagaagccttcgatacgggcgtgcgttacgactttaaaggcaactttgaccttgagggattagaacgcggtattgaagaagttggtccgaataacgtgccgtatatcgttgcaaccatcaccagtaactctgcaggtggtcagccggtttcactggcaaacttaaaagcgatgtacagcatcgcgaagaaatacgatattccggtggtaatggactccgcgcgctttgctgaaaacgcctatttcatcaagcagcgtgaagcagaatacaaagactggaccatcgagcagatcacccgcgaaacctacaaatatgccgatatgctggcgatgtccgccaagaaagatgcgatggtgccgatgggcggcctgctgtgcatgaaagacgacagcttctttgatgtgtacaccgagtgcagaaccctttgcgtggtgcaggaaggcttcccgacatatggcggcctggaaggcggcgcgatggagcgtctggcggtaggtctgtatgacggcatgaatctcgactggctggcttatcgtatcgcgcaggtacagtatctggtcgatggtctggaagagattggcgttgtctgccagcaggcaggcggtcacgcggcattcgttgatgccggtaaactgctgccgcatatcccggcagaccagttcccggcacaggcgctggcgtgcgagctgtataaagtcgccggtatccgtgcggtagaaattggctctttcctgttaggccgcgatccgaaaaccggtaaacaactgccatgcccggctgaactgctgcgtttaaccattccgcgcgcaacatatactcaaacacatatggacttcattattgaagcctttaaacatgtgaaagagaacgcggcgaatattaaaggattaacctttacctacgaaccaaaagtattgcgtcacttcaccgcaaaactgaaagaagtttaattaatactacagagtggctataaggatgttagccactctcttaccctacatcctcaataacaaaaatagccttcctctaaaggtggcatcatgactgatcaagctgaaaaaaagcactctgcattttggggtgttatggttatagcaggtacagtaattggtggaggtatgtttgctttacctgttgatcttgccggtgcctggtttttctggggtgcctttatccttatcattgcctggttttcaatgcttcattccgggttattgttattagaagcaaatttaaattatcctgtcggctccagttttaacaccatcaccaaagatttaatcggtaacacctggaacattatcagcggtattaccgttgccttcgttctctatatcctcacttatgcctatatctctgctaatggtgcgatcattagtgaaacgatatcaatgaatttgggctatcacgctaatccacgtattgtcgggatctgcacagccattttcgttgccagcgtattgtggataagttcgttagccgccagtcgcattacctcattgttcctcgggctgaagattatctcctttgtgatcgtgtttggttctttcttcttccaggtcgattactccatcctgcgcgatgccaccagcaccactgcgggaacgtcttacttcccgtatatctttatggctttgccggtgtgtctggcgtcatttggtttccacggcaatattcccagcctgattatttgctatggaaaacgcaaagataagttaatcaaaagcgtggtatttggttcgctgctggcgctggtgatttatctcttctggctctattgcacgatggggaatattccgcgcgaaagctttaaggcgataatctcctcaggcggcaacgttgattcgctggtgaaatcgttcctcggcaccaaacagcacggcattatcgagttttgcctgctggtgttctctaacttagctgttgccagttcgttctttggtgtcacgctggggttgttcgattatctggcggacctgtttaagattgataactcccacggcgggcgtttcaaaaccgtgctgttaaccttcctgccacctgcgttgttgtatctgatcttcccgaacggctttatttacgggatcggcggtgccgggctgtgcgccaccatctgggcggtcattattcccgcagtgcttgcaatcaaagctcgcaagaagtttcccaatcagatgttcacggtctggggcggcaatcttattccggcgattgtcattctctttggtataaccgtgattttgtgctggttcggcaacgtctttaacgtgttacctaaatttggctaaatccttcaagaagccagccattcgctggcttcttgcctctcaggaaatcacttatgtccaaatggcaactcgcctgatcctccttcaccacgtatgctttgcgtcaccttactatcaggacgctttagcccatgtcccgctttttgatttgtagttttgccctggttttactttatcccgccgggattgatatgtacctcgttggtttaccgcgcatcgccgccgatctcaatgccagcgaagcgcagttgcatattgcgttctccgtatatctggcggggatggcagctgcgatgttatttgccggtaaagtggccgatcgttcagggagaaagccggtcgccatacccggcgcggcgctatttattattgcctcggtgttctgttcactggctgaaaccagcacgttatttcttgcaggccgatttctacaggggttgggcgcaggctgttgttacgtagtggcgttcgctattttgcgcgacacgctggatgatcgacgtcgggctaaagtgctgtcattactcaacggtattacctgcatcattccggtgttagcgccagtgctcggacatctgattatgcttaaattcccgtggcagagtctgttctgggcgatggcaatgatgggcatcgcggtactgatgttgtctttgtttattttaaaagaaacgcgcccagcggcccccgcagcttcggataaaccacgagaaaatagcgagtcgctgcttaaccgttttttcctcagccgtgttgttatcaccaccctcagcgtttcggtgatcctcactttcgtcaacacgtcaccggtattgctgatggaaatcatggggtttgagcgcggtgaatacgccaccattatggcgctgaccgctggcgtcagcatgaccgtttcattctccacgccatttgcgctgggaatttttaagccacgtacgttgatgatcacctcgcaggtgttattcctggcggcggggatcactcttgccgtttcaccttcccatgcggtttctctgtttggtatcacgctgatttgcgccggtttctcggtaggttttggtgtggcgatgagtcaggcgttagggccgttttcattacgcgcgggcgtagccagctcgaccttaggtattgcgcaggtttgcggttcgtcactgtggatttggctggcagcggtggttggtatcggcgcatggaatatgctgatcgggattctgattgcctgtagcatagtgagcctgttgctgattatgttcgtcgcgcctggacgccccgttgccgctcatgaagaaatccatcaccacgcttgatctcaatctgctgctctgtctgcaactgctgatgcaggagcgcagcgtgaccaaagcggcgaagcggatgaacgtgaccccttcagcggtgagtaagtcgctggcaaagttaagagcgtggtttgacgacccgctctttgtgaactcaccgctggggctgtcgcccacaccgctaatggtcagcatggagcaaaatctggcggaatggatgcaaatgagcaatctgctgctggataaaccgcaccaccagacaccgcgcggcctgaagtttgagttggcggcggaatcgccgctgatgatgatcatgcttaatgcgctgtcgaaacggatctaccaacgttacccgcaggcgaccatcaaactacgtaactgggattacgattccttagatgccattactcgtggtgaagtggatattggtttttccggtcgcgaaagccatcctcgctcgcgggagctgttaagctcgctaccgttagccattgattatgaagtgctgtttagtgatgtaccctgcgtctggttacgcaaagatcatccggcactgcatgaaacgtggaatctggacacctttttacgttatccgcatatcagcatttgctgggaacagagcgacacctgggcgctggacaatgtgttacaggagctggggcgcgaacgcacgattgctatgagcctgccggaatttgagcagtcactgtttatggcagcgcaacccgacaatctgctactggcgaccgcgccgcgctactgtcagtactacaatcaactccatcaactgccgttggttgctcttcctctcccgtttgacgaaagccagcaaaaaaagctggaagttccttttaccctgctgtggcataaacggaacagccataatccgaagatcgtctggttacgggaaaccattaaaaacctttacgcgtcgatggcataaccgaatcgtatgaaacgcgacccaatttcacaataaaatgtaaaaaagttgtaataagcttgtctgaatcgaacttttagccgctttagtctgtccatcattccagtaaatgattactcttgtattcataatggaccattaagcatggagcgaaaaatggcgactcactttgcccgagggattttaacggaaggacatctgatttctgttcgtctcccctcccagtgtcatcaagaagcccgaaacattccccctcatcgtcaaagccgttttctggcgtctagaggtttactcgcagaactgatgttcatgctgtatggcattggcgaattgccggaaatcgtcaccctgccgaaaggtaaaccggttttcagtgataaaaatttgccttcgttttctatttcctatgccgggaatatggttggcgtggcgttaacaaccgaaggtgaatgtggtctcgatatggaactacagcgtgcgacgcgcgggtttcatagcccacacgcgcccgataaccacaccttttccagcaatgaatcgctatggatcagtaaacaaaacgatcctaacgaagcgcgggcgcagctcatcacgctgcgccgaagcgtgctaaaactaaccggtgatgttttgaatgacgatccgcgcgatctgcagctgctgcccattgccggacgcctgaaatgtgctcatgtaaatcatgtagaagcgttatgcgacgcggaggacgtgctggtgtggtccgtggcggtcacgcccacgattgaaaagctcagtgtctgggagttcgatggcaaacacggctggaaaagcctgccggatattcacagccgcgccaacaatcctaccagccggatgatgcgttttgcccagctctctaccgtgaaggctttttcgccaaattgatagacaaccacaggagtcatcatgtctgaaaaattgcaggtggttacgttactggggagcctgcgcaaaggctcatttaatggcatggttgcacgtaccctgccgaaaattgctccggcaagcatggaagtcaatgcgttaccttccattgccgacattcctctgtatgacgctgacgtacagcaggaagacggttttccagcaacggttgaagctctggcggaacagatccgtcaggctgacggtgtggtgatcgtcacgccggaatataactactcggtaccgggtgggctgaaaaatgccatcgactggctttcccgcctgccggatcaaccgctggcaggtaaaccggtgttgattcagaccagctcaatgggcgtgattggcggcgcgcgctgtcagtatcacctgcgccagattctggttttcctcgatgcaatggtgatgaacaagccggaatttatgggcggcgtgattcagaacaaagttgatccgcaaaccggagaagtgattgatcagggtacgctggaccacctgaccgggcaattgaccgcatttggtgagtttattcagcgagttaagatctaaataaaaaacccgccagtaatcatgcatggcgggtttttaatgcgctatcgattttaatgagggtcgataaatacaatcttcaggataaacatcagcgcaacgatgattacgcacgggctaaggtcacgcagacgcccggtaccaatcttcatcacgcagtaggagataaagcccagcgcaataccttcggtaatcgaaaagctgaacggcatcatcacggcggtaataaacgccggaacagattcagtaagatcctgccagttcacgcgagcaagacttgaggtcatcaacacgccaacgtagatcaacgcgccagctgcagcgtagcctggcaccattcccgccagcggcgacagaaagataaccagcaggaacagcagaccaacaaccactgccgtcagaccggtacgaccgccaaccgatacgccggaagaggactcaatataagccgtaacggaagaagtaccgataaacgaaccggtcacggaagagatactgtcgacatacagcgcctgcttcatgcgcgggaatttacccttctcatccgccaggcctgctttatcggtcacgccaatcagcgtaccggaggagtcaaacaggttgaccagcatgaaagagaaaatcacccctgccagcccgaggttaaacgacccggctaaatctacatggcccacgacagtcattacgctcggcggcgcagaaacgatgccattgtagtggacatcacccagcatccagcccagcagcgttgtcaccacgatggaaaccagcaccgccgcgtgaatgttgcgcgaggccagaatagcgatgatgaagaagccgaggatccccagcagcacgctgtgagaagtcaggttaccgatgctgaccagcgtttccgggttagcgacaatcacacctgcattcttcagtcccatcataccaatgaacagaccgataccgctggtgatgcccacacgcagacttaccggaatgttggcaatcatccagtagcgaacgcggaaaatcgtcagtaacagcagaccaatcgcaccccagaagattgcgcccatcccgacttgccacggcaagcccatcgcctgcacaaccacaaaagcgaagaacgcattcaggcccatagcgggtgccagtgcaactggcaggttagcaaacagtcccatcataatactgccgaatgcagcaatcagacaggtagtaacgaagacggcgctggtatccatgccagcaacgccaagaatttgcgggttaacaaaaacgatgtaaaccatcgtcaggaaggtggtaaaaccggcgatcacttcggtccgtgccgtcgtgccatgttcgcgcagtttaaacacgcgttccagcatcccctggccagaagcctgggttgtgtgttgttgactcattatctatttccgaacaaggagggaaaatccgtcgctatcgtataccaaaatgagacaatatggacggctgaagataactttttttcattgtatttgcttatacggcaacgattgcgtcatgcgaattggcatgacgaaaacgttaaactaacgataaaggaaagacatgtcccagatagaagcggtatttttcgactgcgacggtacgctggtcgacagtgaagtcatttgctcccgcgcatatgtaacgatgtttcaggaatttggtattacgctcgatcctgaagaggtattcaaacgtttcaaaggtgtaaaactgtacgaaattatcgatattgtttcccttgaacatggtgttacgttagcgaaaacagaagctgaacacgtttaccgtgcagaagtcgctcggctgttcgattcagaactggaagccatcgaaggggctggagcgctcctgtcagcgatcactgcgccaatgtgtgtggtatctaacggcccaaataacaaaatgcagcattctatgggcaagctgaatatgttgcactacttcccggataaactgttcagcggctacgatattcagcgctggaagccagacccggcgttaatgttccatgcggcaaaagcgatgaatgtaaatgtagaaaactgcattctggttgatgactcagttgccggtgcacaatctggtatcgacgcaggtatggaagtgttctacttctgcgccgacccgcacaataagccgatcgttcacccgaaagtcaccacctttacccatctttcgcagttacctgaactgtggaaagcgcgtggttgggatattacggcatagttcttcacactcccttcacttaccccgcttaaattggcgctcaaaggtaagtaaagggagtttgatatgtctgtttcacgtcgggtaatacatcacggactttattttgcagttttaggaccgttaattggtgttctgtttcttgtcctctacatattcttcgcaaaagaaccgctggttctttgggtgataatacatccaatttttctcttattgtcgataactacgggagctattcctgcgttgttaaccggtgtaatggttgcctgtctgccggaaaagatcgggtcacagaaacgttatcgttgtctggctggtggcataggtggcgtcgttatcaccgagatctattgtgcagttattgtacatattaagggcatggcttcctcggagttgtttgaaaacattctttctggtgacagtctcgttgtccgcatcattcctgcattgctggcaggtgtggtgatgagcagaatcattacccgtctacccggattggatatttcatgtcctgaaacagactctttaagttaagcgggatactttatctttgggctactcaaaagcagacaggatgtttctatgactcaaaatatcaggccgttaccccaattcaaatatcatcccaagccactggaaacaggcgcatttgaacaggataaaaccgtagagtgcgattgctgtgaacaacagacgtcagtttattactcgggtcccttttattgcgttgatgaagttgaacatctctgtccgtggtgtattgcggacggttctgctgctgaaaagtttgcaggtagttttcaggatgatgccagcatagaaggtgttgaatttgagtatgatgaagaggacgaatttgccggtattaagaacacatatcctgatgaaatgctgaaagagttggttgaacgcacgccaggttatcatggatggcagcaggaattctggctcgcgcattgtggcgatttctgtgtttttatcggctatgtgggctggaatgatataaaagatcgcctcgatgaatttgccaaccttgaagaagattgtgagaatttcggtattagaaattctgatctagctaaatgcctgcaaaagggtggtcattgtcagggttatctcttccgctgtctccactgcggcaagctgagactgtggggtgatttttcgtagttatttaaataatgagaacaggccggagcgtaattcacacatccggccttatttcttaagcttaaccgagtgctaattctgcggcagcggctttatcagcgattaccatcagcgaaggatgcagctgcaacacggaagctggaacatcttcggtaaccggaccttgcagaacatttttcagtgcctgcgctttacccgcgccgctgacaattatcagcaagtttttcgccgccatgatgcttttcggccccatcgtcacgtagctgtcaggcactaacgaaaagtcgccgcccaactcgccatgcgccacaatatcaaccatctctccctggatcgggaactccacggtttgctcatggaaatgggtcgtattcggcaaattgccacaaaaatgaccatctgcacctaatcccagcaccaccaaatccagtccgccttcacgcgccagtttctgatcatgctcgcggtagttatcaatagtgagcttctggatattctcttctttgatccccgcaggggtgaaaaacagattacgcagattggtaatcgttacgccttctccctctttgccgcgaaatggaatttcatcaaaattatagaaatagcagttatcgtaccagggcttacctttaaccagggtggtgaggtattcatacatgcctttgggcgtgctaccggcggtaattgccaggttaacacgacgcgtcttcgacatataaccaagcagatggtgtgccgcgacacggctcatttcctggtaatcttcggtaatgattaatttcatcttaatgccttattttatttaaataatttctgtacaaaggctgcataggctggtcgccagacatccatttcatggttcagacccggatattcctggtaatcaaagttaatttttttctgctcaagctcagttttcagcccggcgatatccttgccggttacgacatctttatcccccacaaccacagtaaaattacgtagttgctggttgatagctgccggatcgttcagtcgggccgcgacaccttcatccggtacggttgtcgtggtaacaccactgaatgtggccagccagccaaagctttccagatgattcattccggaaaccagcgcctggtacccgccttgtgaaagccctgccagcgcgcggccatcggcatctttacggacattaaaacgcttgctaatcagcgggataatatcgttcatcagttcgcgatctgccgctttagcattcagcggataaaagactttacgtctttcctgaggcacgaaatcttcgggaataatgcccttcgcatcggtttctgtatccgggatcaccaccagcatcggtttaattttcccttcagcaagcaggttatccatgatttgcgggatacgcccctgatcgatagcggaacgtccggtatcaccaaagccgtgatagaaatagagcactggcaaaggctcgcccatgccggtgtatcctggcggggtccagacatacatctgacgttcagattgcaatgcgttggagtggtaagttatggcgatcaaatcaccatgcgcaacagaacgcgtatccagataactgcctggcaccagaatcatactggagttaacctggcgctgaggcttagtcattgcggtgcctgtatcaatgctgcgtacaccatcaacattgaaaaaatactcgtacaggttgcctttcaggataggtgtgcgccacgaccagactcctgcttcgtctttggtcatcgggtgaatattgtccggaaccggaacacccaccactacagagacattttttgccccaggggcaaagtagcgaaaggtcacgctgttatcggcattgacctgagtcacatactgtttcaccgggatagtgggtgccgggctggctggcatatccgctgctatggcccactgagcagaaataccgctggcaatagccagcgttaaagcagcaatttttatattcatcgtaatattcctttcattaagttccattaccaccagatttcagcctgggcaccgacagcaaactggtcgtctttattgtcttcaaaggtgaagccatccagttcgttttccagggctttgatatacgtggcgtagaaacgaatttccggacgcgaggtcaacatactggtattgactttaaaggtatggaagagcgtggttttataaccagactcattaaatttattactattcgcatctttgttttgctgggtgaaatagcccagttcaacacctgtctggttatattggtcccaaatataggccgggcgaacaaccgcacgaatagattcgaaatcagagtgggcgcctgtttcgtagctatatatatcgttaccgaaggagtaaacaatcgcgttagctacaatgaaatgatcgccaatataggcttcgccctgcgaagtcagacgtaccgctgttccgccggtgtgatcaccataataacgaccattaaaggtggtaaatggacttgcgccagcataacggccaaagttactggcgatagagttattcgcgaccaggaaggagaattcgttgaagccacctttatcaaatttctgcgttaaagatgtgccaaacatccaggtatctttccagtcataatacccgttattatcctgattatctttttccgatgcgctttcgtttgccgtgacataacgaccacttaccattaaggtggctttatcccataacgggatatctttatagcgtaaatcaatggtattggtattaatctgctgtttgttttgcaggctgcgatcgtaatcatcgacatcttcgcgaaccagcgcgatatcaattttacccggaccgactttccagttttccagacctacacccgctgcggcatcagtacgctgcgttttccagtcaagcatctggatttcaattttcggcgcaccgtgtttacccacccagaaatcagcctctggcgcaaagggcaggaaacctttggtggtaacgtacatatcggagaactgcatatagttctcgccaccggcgttatcgccaaaccagccggtagagtactgctgaccaacgttaccatccatcatcacaacggcatcaacccgtttgccgttttcgttgtagacacgttgttttaactgcaaatcaaaccagccggagtattcgttaccaaagcggcccagagaaccaatcgcccatgatttaggtgaaccatgagaggcggtcccccaaccagaacggtaatagccgttgtaactaaagccaatttcatctttcacaaatttactgaaatctttcagagtcatggaagaataaatcgagcctgtctcactggcatttttctcttcatttttgaccagtacagcatcaggttttgcggcactactggtcgggaacggattggcggcatacccttgatcattcgtacttacgctacgattcaccgtcgctggcgtatactttttcttctcttcatctttatactttttgagttcgctttgcgtttctcttaacgccttttctaataactcaaggcgttgttccaccgttaatgattcagccaatgattgtgcagaaaaggctaacggtgccattaataagatggcagaggtaataagatttcgtctaaacataatatccctttatggtgcaaagaaagaattaacgcatcgcatccagactgttctgaatgcgacgataattaaggtgctttaatggttattttttttaatgacagcccccgcgtcttgatcacctctgcataccatccgaagcttttcttgcgtgttcttgtgaggcttccttcgccattatcatcacgatccacataaataaagccgtagcgcttagacatttgtgaatgagatgcactgactaaatcaattggcccccaactggtgtaccccataatatccacaccatcggcaatcgcttcatttacctgtaccaggtgatcgtttaaataggcaattcgataatcgtcctgtatcgaaccatccgcttcaacgctgtcttttgcgcctaatccgttctcgacaataaataacggtttttgataacgatcccaaagcgtatttaacagaacccgtaatccaaccggatcaatttgccacccccactctgaacttttcagatgcggattggggatcatattcagtatgttgccctgcgcatttttattaatgctttcgtcgtgggaaacacaaccagtcatgtaataactaaaagagatgaaatcgacggtatgttttaaatcttctgcgtcactttcagtcatctcaatggtgatattgtggtcgcggaagaaacgctgcatatagccgggatactggccacgcgcctgaacatcaccaaagaacatccagcgccggttctcttccatggcctgcaacatatcctgtggctggcaggtgagggggtaaaccagcccaccgagaagcatattgccgattttcgcttcggggagcaggctatgacaggctttaactgcccgcgcactggcaaccagttgatggtggatagcctgataaacttccgcctcgccactctcttctgccagccccacgcccgtgaatggcgcgtgtaacgacatgttgatttcattaaacgtcagccataacgccactttatgttggtagcgagtaaagaccgtgcgggcgtaatgctcgaagtgatcgatgaccgctcgattagcccaaccgccgtagtttttcaccagcccatatggcatttcgtaatgggataacgttaccagcggcttgatccccgcctgcgccatttcatcaaacagccgatcgtaaaacgctaaccccgcttcattcggttcgacttcgtcgccctgagggaaaattcgcgcccaggcaatggaaatacgcagacaggtgaagcccatctcggcaaataacgcgatatcttccgggtaacggtgataaaaatcgatggcgacatctttgatattctctttccccaggatgcgcggttccatttttcccattacgccatgaggctgtaaatctgaggtcgagatccctttaccatcttcctgccaggcaccttccacctgattggcagctgttgcgccaccccaaagaaatgtttctggaaatgctttcataattaactccttttatcgttagcgaatgatggataacagcggttcacctgcgcttatctgcgccgtgccgtggggtaatacgtccgtaaaatcatcgctattactgattaataccggcgtcgtcagatcaaatccggcctcgcgaatagcagggatatcaaaagaaatcagccgatcgcctgtattgaccttgtcacccacgttgacgtgagcggaaaagaatttgccgtccagttttacggtgtcgataccgacatgaatcaggatctccacaccatcatctgactcaatgccaatggcgtgtaatgtggcgaacaacgaagcaattcgacccgcaaccggagaacgcacttcaccaaccgagggcagaatggcaatacctttacccaacaggccactggcaaacgtggtatcagcgacgtgaatgagcggcacaatctctcccgtcatcggtgaacagataccgccctgctcaggtggtgtaataacctctggtgttttctcttgcggggcaccctgcgctggctgacgtttagcggtgatgaaatgaagcatcaccgtaccgacaaatgcgcaaccgatggcaatgacaccgccaataacgctggcccagacggtgaaatcaattcccgttgacgggatggtttgcatgaaggtgaaaatacttggcaaaccaaaggagtagactttcgtttgcgcgtagccaataatggtggcccccaaagccccactgatacaggcgataacaaaggggtacttacgcggcaggttgacgccatataccgctggttcggtgataccaaacagactcgtcaacgccgctgatcccgccaccacttttttctgcgcatcgcgttcgcagaggaagacgccgagcgccgccccgacctgcgccataatggcgggcattaacagcgggatcatggtgtcgtagcccagcacggtgaagttattgatacacagcggcaccaggccccagtgcagtccgaacatgacgaagatttgccagaagccgcccattaccgcgcccgcaaatgcaggaaccgcctgataaagccagagataaccggcggcaatcagttcgcttatccaggttgatagcggccccaccagcagaaaggtgacgggtgtgataaccatcagacatagcaatggtgtgaagaaatttttgattgccgacggtaaccacgcattaagtcggcgttccagaatgctgcacaaccaggcagaaaaaataatgggaataaccgatgacgagtaattcaacaatgtgaccggaatacccaggaaatccagccccagcgcatccgctttttgcccgttctcgaaagcagtcagaattaatggatgcactaacgctccaccaatcaccatggcagtaaatggattaccgccgaagcgtttccccgcggtgtatcccaggattatcgggaagaaccaaaacaaggcatcactggcgctgaataaaattaaataagtaccactttgttcggtcgtccactgaaaagtgagcgccagagccagcatacctttcaagatcccggttgccgccatcaaaccgatcagaggcgtaaaaatacctgaaataacataaacaaagcggtttagcagattacctttatcatcattttccggtgcctgttgcgctttttcgtcaaggcctgccacactgttaaccgccaggaagacatcggccacatggttacctatgaccacctgaaactggccaccgctttccaccaccataataataccgggggtctttttcagtacctctgcttgcgctttgctttcatcctttaatttaaaacgtaatcgcgttgcgcaatgcatcagactcacaatgttatctgcgcccccgactcctgcgactatttttctggctaactccgtcataacttgccctctaccgctttgcggcaaaactccaaaaaaaacctgaaaaaaacggcctgacgtgaatcaagcaatttttttcaggttttgcccgcttagtgcggtaacaatcctttactcagtaataatatttcagtgttctttgcgcacgcgctctatatttatggctaaaaacataatctctgcgggtgaaattttacgttgatactgcaaaccaataaaaatggcgatccgttccgcacattgccatgcttgcgggtaattttgttttactgcttgttgtaatgattcatcactatcgttaattgaagcatgttcaagaatacgccaggataaaaacttcagatgtgtaaccagtcgctgataactcaagctttcttcctggtaattaaggctgaactgaaattttattaattgcagcatttcgcgcattaactgcgtgacacctgcaacatcctccatatttccgctcatttgggcactgaccagatgcatggcaataaagcccacttcatctttcggtaactgcacgcccaaccgtttatcaataatggttaacgcttcttcccctagctggaactctttcgggtaaagccgctggatatcccacagcaacgggttgggcagcaacacgttttgctgaaagcgtttaatcgcaaactggcaatggtcagttagcgagatataaatactgtcctgtaattttcccaagcgctcctgcgctaaagagataatacgatcacaggttgccatcacctcaagaggaatatgacttaagagttcgcttaatcgcccgttcagttcatgactgctcaaggcatactctttttctattccacttgagttaattctttcgccagcgcgtttttgaaagccaattccgcgccccatgacgactttttcccgctgttgatcatcaataaccaccacaacattattgttgagaattttggtgatttgcatgttcatagcaaggaccttttttataaacaaaaaaacccgacttcaccagtattctctggttatgtcaggttttgcctgcgaatgcagtaacaatccagtcatttattaatggtttttataacgaacatccaggttcggaaattaatttaattgcgtgcagagaaaatagcaatgcgctattgataaaaatatgaccatgctcgcagttattaactttgtgtaattttaggaatttataaagttatatataacaaatcccaataattaagttattgggatttgtctggtgaattatttgtcgctatctttccccgccagcagtttatccagctcatcgccaccgacgtgacggaaatcctgccccttcacgtagtagaagataaactcacaaatattctggcagcggtcgccaatacgttcgatagaacgcgcgcagaacagcgcagtaagtacgctcggaatggtacgcgaatcttccatcatgtaggtcatcagttgacgaacaataccttcgtattcctgatcgacttttttatcttcacgataaatacgtaccgcttcgtcaatgtccatccgcgcgaacgcgtccagcacgtcgtgcagcatctggatggtatgacggcccagcgactccagacttaccagcaacggctgatgctgctgggagaatttctccagcgcagtacggcagattttgtccgccacgtcgccaatacgctccagctcggcaatggttttactgatcaccataaccagtcgcaggtcgctcgccgtcggctgacgtttggcgataatgcgcacgcaggcttcatcgatcgccacttccatcatgttgacgttcttgtcgccttcgatgacgcgcttcgccagatcgctgtcctggttatgcatcgcggtgattgcatcagaaagctgctgctccaccatgccgcccatggtcatcacctgcgtgcggatactttccagttcggcgttgaactggccggaaatatgtttattaagattgagactgtccataacgcactcctgaatcaaccgtaacgaccggtgatgtagtcttctgtttgtttcttcgctggcttggtgaacagatcgtccgtgttgctgaactcaatcaattcgcccaggtacataaacgccgtgtggtcggaacaacgcgcagcctgctgcatgttgtgggtgacgatcaccacggtgtaatcctgcttcagttcggtgatcagctcttcaatacgcccggtagagatagggtcgagcgccgaacacggttcgtcgagcagcagcacttccgggcgaatggcgataccacgcgcaatacacagacgctgttgctgaccaccagagagagagtaaccgctctggtgcaatttatctttggtttcgttccacaatgcggctttggtcaatgcccactgcacgcgctcgtccatgtcggcacgggagagcttctcaaacagacgaacgccaaaagcgatgttgtcgtagatggacatcggaaacggcgtcggtttctggaacaccatgcccactttcgcacgcagcagtgcgatatcctgagagttggtcaggatgttgtcgccatcaagcagaatttcaccttccgcacgctgctccgggtacagttcaaacattttgttgaaggtacgcagcagcgtcgatttaccgcagccggacggcccgataaacgccgttacctggtttttagcgatatccaggttgatgtttttcagggcatggaatttgccgtagtagaagttcaaattacgaacctgaattttactcggggcagtttcaaccatactcattgcaatcttttcctcatcgtgcctgatgcacttcgctaatcaggcttaccgtaggccggatcaggcgttcacgccgcatccggcaaagtgttaaccgtgtacagagtcaaaaaggcgctcggtcggtcccctcgcccctctggggagagggtgaggggaaaaccgtgtcagcaatatcaaccgtgtttattcttcgcaaaaacaacgcgcgccagaatgttcagcagcagtacgcacagggtaatgatcaataccccggcccaggccaattgctgccattccgcaaacgggctcatcgcaaacttaaagatcgtcaccggcaggttggcgatcggctgcatcatgtccgtgctccagaactggttggagagcgcggtaaacagcagcggcgcggtttcaccagcaatacgggcaatcgccagcaggataccggtcataatcccggacaccgacgctttcagcgtaatcgcagagatcatcttccacttcggtgtacccagcgcataagccgcttcacgcaggctgtacggcaccagtttcagcatgttctcggtggtgcggataacaatcggcacctgcaacaacgccagggcaatcacgcccgcccagccggagaagtgctccatctgcgccaccacaatggtgtaaacaaacagaccaaccacaatcgacggcgcagagagcagaatgtcgttaatgaagcgaatcacttctgccagccaggatttacgaccatattccgccagataaatccccgccataatgcccagcggcgtaccgaataccgtggcccacaaaattaacagcccgctacccgccagagcgttcgccagaccaccaccttccgtattgggcggcggcgtcatttcagtgaacagcgccagcgacataccgtcgataccgcgagtgatggtggacattaaaatccagatcagccagaacaggccgaaggccatcgtcgccatcgagagcgtcagcgcaatacggtttttgaggcggcgacgcgcctgcattttgcggcgagattcagccagcgccgcagtggtttgcatttcaaccatagccattagcgtgccccctcattcttagccaggcgcataatcataaacttcgatgcggcgaggacgatgaaggtaatcacaaacaggatcaggcccagttccatcagtgcggcaacgtgcagaccggattccgcttccgcaaattcgttcgccagcgcagaggtgatactgttgcccggcatatacagcgaggcgctgtcgagctggtaggtgttaccgatgataaaggtcaccgccatggtttcaccgagcgcgcggcccagccccagcatgatgccgccgataacaccatttttggtgaacggaagaacgatacgccagataacttcccaggtggtgcagccaataccgtaggccgactctttcatcatcaccggggtttgttcgaacacatcacgcattaccgccgcaatgtacggaataatcatgatggcgaggatcacgcctgccgcgaggataccgataccaaatgcggggccagagaacagcgcgccaacaatcgggatattcgacatgatattgccgaccggctcctgaaagtaaacggcgaacagcggcgcaaagataaacaggccccacatgccgtaaacgatacttggaatggctgccagcagctcaatggcgatacccagcgggcgtttcagccagccaggcgcaagctcagtcaggaacagggcgataccgaaactcaccgggacggcgatcagcagcgcgataaacgaagtcaccaacgtaccgtagatcggcaccagcgccccgtagatatcgttcggtgcatcccactctttggtccataggaaagccagaccaaatttctgaatgctcggccaggaggagatgatcagagagacaataatgccacccaacatcaatagcacaatcagcgccgccagttttaccagcacgctgaaaattatgtcgccctttttacccggtgggttaaaagcaggcttggttgcagccataagttactcttcagttaaacgcgtttacaaagtcattttgtaatgccggatgcggcgtaaaacaccgtacccggcctggagttttattagtacagcggcttaccgctactgtctttaatattggtcttccacgcagcgcgaacctgttcaactacactatccggcaggctggcgtaatccaggtcgttcgcctgtttagccccggttttgtacgcccagtcgaagaatttcagcacttctgtgccttgttctggtttcttctgatctttgtggatcagaatgaacgtggtagaggtaataggccatgcatcttcgcctttctggttggtcagatcctgagcgaaggttttgctccagtctgcaccttttgctgcattagcgaagttttcttcggtcggactaaccggtttaccatcagcggagatcagtttggtgtacgccaggttgttctgcttcgcgtaagcatattcaacataaccaattgcacccggcagacgctgaacgaacgcggcgataccgtcgttacctttaccgcccagaccgatcggccattttacggtagagccagtaccaacgttgtttttccactcttcgttcactttcgccaggtagctggtgaagacgaaggaagtcccggagccatctgcgcggcgtactacagcaatgttttgtgaaggcagtttcagacccggattcagtttggcgatggcttcatcatcccacttcttgattttgcccaggtagatgtcgccgagggttttaccatccagcaccagttcgccagacttcagccctggaatgttaaccgccagcaccacgccgccaatcacggtcgggaactggaacagaccttcctgagccagtttttcgtcagacagcggcgcgtcagaggcaccaaaatcaacggtattagcgataatctgttttacgccaccggaagaaccgataccctggtagttaactttattaccggtttctttctggtaagtgtcagcccatttggcatacaccggcgcagggaaggttgcacctgcacctgtcaggcttgcttctgcaaacacagagaaagcactcatcgataaggtcgcggcgacaacagttgcgacggtggtacgcataactttcataatgtctcctgggaggattcataaagcattgtttgttggctacgagaagcaaaataggacaaacaggtgacagttatatgtaaggaatatgacagttttatgacagagagataaagtcttcagtctgatttaaataagcgttgatattcagtcaattacaaacattaataacgaagagatgacagaaaaattttcattctgtgacagagaaaaagtagccgaagatgacggtttgtcacatggagttggcaggatgtttgattaaaaacataacaggaagaaaaatgccccgcttacgcagggcatccatttattactcaaccgtaaccgattttgccaggttacgcggctggtcaacgtcggtgcctttgatcagcgcgacatggtaagccagcagctgcagcggaacggtgtagaagatcggtgcaatcacctcttccacatgcggcatctcgatgatgtgcatgttatcgctacttacaaaacccgcatcctgatcggcgaagacatacaactgaccgccacgcgcgcgaacttcttcaatgttggatttcagtttttccagcaattcgttgttcggtgcaacaacaataaccggcatatcggcatcaattagcgccagcggaccgtgtttcagttcgccagcagcgtaggcttcagcgtgaatgtaagagatctctttcaacttcaatgcgccttccagcgcgattgggtactgatcgccacggcccaggaacagcgcgtgatgtttgtcagagaaatcttctgccagcgcttcaatgcgtttgtcctgagacagcatctgctcaatacggctcggcagcgcctgcagaccatgcacgatgtcatgttcaatggaggcatccagacctttcaggcgagacagcttcgccaccagcatcaacagcacagttaactgagtggtgaatgctttagtggatgccacgccgatttctgtacccgcgttggtcattagcgccagatcggattcgcgcaccagagaagaacccggaacgttacagattgccagtgaaccaaggtaacccagctctttcgacagacgcaggccagccagggtatccgcggtttcgccagactgtgacaaggtgatcatcaggctgttacgacgcacggcagatttgcgatagcggaattcagaggcgatttcgacgtcgcacggaatacctgctagcgattcaaaccagtagcgggaaaccataccggagttataagaagtaccacaggcgaggatctgaatatgctcaaccttcgacagcagttcgtcggcgttcggtcccagctcgcttaaatcaacctgaccgtggctgatgcgtccggtaagggtgtttttgatcgcgttcggctgttcgtagatctctttctgcatgtagtgacggtaaatgcctttatcgcccgcgtcatattgcagattggattcgatatcctgacgttttacttccgcgccagttttatcgaagatgtttaccgaacggcgagtgatttccgcaatatcgccctcttcaaggaagataaagcgacgggtcaccggcaacagcgccagctggtcagaagcgataaagttttcgcccatccccaggccaatcaccagcggactaccagaacgtgccgccagcagggtatccgggtgacgggagtccatgatcactgtaccgtacgcaccacgcagctgcgggatagcacgcagaacggcctcacgcagagtcccgccttgtttcagctcccagttcaccagatgggcaatcacttcggtgtcggtttcagaaacgaaggtatagccacgcgcttttagctcttcacgcagcggttcatggttttcgatgatgccgttatgcaccaccacaatgtgttcagaaacatgcggatgcgcattcacttctgaaggttcaccgtgggtcgcccagcgagtgtgagcaataccagtgccgccatgcagaggatgttcttccgctgcctgtgccagcatctggactttaccgaggcgacgcaggcgggtcatatgaccttctgcatcaacaacggccagaccggcagagtcatatccgcggtattccagacgacgtaaaccttcaagaaggatttctgctacatcacgttgcgcgatcgcgccaacaattccacacatagtttttgattccgatttatatcgttgtcggtcaacctgtatgcccgttttttcgggcgccccgagccttgtagagagtggggttatttttatagttactgcttgtgggagggagattatgttatctcctcatcccatgtgaccgggttagccggccagaatcactttttctttaccggacgacgccagccttctttctgagtctgcggcacacggctgatagctaatgcattttcgccgacattacgcgtcacagttgtacccgcagcaatggtcgcgcctttgcctactgttaccggggccaccagctgagtgtcggaaccaacaaacacatcgtcgccgataatggtcttaaatttattcgcaccatcgtagttgcaggtaatggttcccgcgccgatgttaacgttatcgccaatttccgcatcgcccaggtaagtcagatgaccagctttcgagcctttacccagacgcgcttttttcatctcaacgaagttaccgacgtgagcaccttccagcaactcagcaccaggacgcaaacgggcaaacgggccaatggtacaggccgctgccagattcgcatcttccacaacggtatacggactgatttcgcaatcatcgccaatcacgctgtttttaatcacgcaaccggtgccaattttcacgcgatgaccgagagtcacgttgccctcgatgataacgttagtatcaatttcaacatcgcgcccgtgagttagcgtaccacgcagatcaaaacgcgctggatcgcgcagcataacgcctgctaacagcagtttttcagcctgttcggactgataaacacgctccagacgggagagttgcaggcggttattcacgccttctacttcgcttaaacgttgcggatgaacggcgacgatttcacgcccttcctgatacgccagcgcaataatgtcggtgatgtagtattcgccctgagcattattgttggtcagcttcgccagccagcgtttcatatctgcgccgttggcaatcagaatgccggtgttgatctcctgaatctgacgctgctcgtcggtggcatctttgtgctcaacaatgccggtaactttgccgttttcacgggtgatacgtccataaccggtcggatcatccagtttcaccgtcagcagaccaatgccaccctgcggtttagcatcacgcagacgctggagtgtttcgacagagatcagcggcacgtcgccgtagagcattaaaatgtcttcatcatcggcaaagaaaggtgcggcctgctgcattgcatgacccgtacccagctgctctgcctgaagcacccagttaaggttgtcgtctttcagcgcctgttttagcagatcgccgccgtgaccgtacaccaggtgaacgtgcgctgcgcctaattcattcgcagcatcaatgacatgctgaaccatcgctttcccggcaagggtatgcagcactttcggaagatcggaatacatgcgcgtgcctttgcctgcggcaaggatcactacgctcatagcattattcaacatacgcgtcctgactgtaatttgagaacgaatttaaaccgcttcaccttgaaaaaactacatttttttcatcgtgaaatggacagaggataaattgttcaataacggattatccccgctgacgaaagcgccattttcgaccatcgtcacgccttttgtctgcagaaaattaaggcagtaccttaatttaagcgtcaggtggatgtttttgctcttatttcgatcaatgaataaacaggaaaacaggggggttttatatcagcaggatctatgtgaacgctattcaggacgggtcacacgcgcaaaaaaaagccagcctgtttccagactggcttttgtgcttttcaagccggtgttacatcgcttttttggtcaactcgataacgcgcagctgcgcgatcgctttggccagttccgcagacgcctgagcgtaatctacgtcgccgtgagagctgctaatgtgctcttcagccttacgtttcgcttccatggctcgcgcttcgtcgagatcctggccgcgaattgcggtgtcggccagaacggtcacgttgccaggctgcacttcaagaatgccgccagacagatagataaactcttcgtgaccgtgctgtttcacgatgcgaatcataccaggcttaatggcggtgagcagcggtgcgtggccagggtagatccccagttcaccttcgctacccgttacctggattttctcgaccagaccagagaacatttgttgctctgcgctgacgacgtccaggtggtaagtcattgccatatcaccctccgattaaggcgttaaagttttttggctttttccacagcttcttcgatggaaccgaccatgtagaacgcctgctccggcaggtgatcgtattcgccttccatgatgcctttaaagccacggatggtgtctttcagggagacgtatttacccggagaaccggtgaatacttctgccacgaagaacggctgggacaggaagcgctggatcttacgagcacgcgctaccaccagtttgtcttcttcagacagttcatccatacccaggatggcgatgatgtctttcagttcctgataacgttgcaggatggactgaacgccacgcgcggtgtcgtagtgttcctgaccaaccaccagcgggtccagctgacggctggtggagtccagcgggtcaacggccgggtagatacccagagacgcgatctgacggctcagtaccacggttgcgtcaaggtgcgcaaaggtggttgccggagacgggtcagtcaagtcatccgcaggtacgtatactgcctgtacggaggtgatagaaccagttttggtggaggtgatacgttcctgcagaacgcccatctcttccgccagggtcggctgataacctaccgctgaaggcatacggcccagcagtgcggatacttccgtaccggccagggtgtaacgatagatgttgtcaacgaacagcagaacgtcacgaccttcgtcacggaatttctcagccatggtcagaccggtcagagcaacgcgcagacggtttcccggcggctcgttcatctggccatacaccagggatactttgtcgataacgttggagtcggtcatttcgtggtagaagtcgttaccctcacgagtacgttcacctacgcccgcaaacacagagtaaccggagtgctcgatcgcgatgttacgaatgagctccatcatgtttacggttttacctacacccgcaccaccgaacagaccaactttaccgcccttagcgaacggacacatcaggtcgataactttgataccggtttccagcagttcctgagagtttgacagctcttcgtaggaaggtgctgcgcggtgaatcgcccaacgctcttcttcaccgatctcgcctttcatgtcgaccggttcacccagtacgttcatgatacggcccagagtcgctttacctaccgggacttcaatcgggtgttcgaggtcttttacatccagaccgcgacgcagaccgtcggaggaacccattgcgatggtacgtacgataccgccgccgagctgctgctgaacttccagcaccagacgctcattaccattttgcacctcaagagcatcgtacacgcgcggtacggcatcctgagggaattcgacgtcaactacggcgccgattacctggacaatctttccagtagccatcttaaatcctctacgaaataacctgtttaaaccgcggcggcccccgagacgatctcggtgagttcctgagtaatgctggcctgacgagctttgttgtataccaactgcagctctttaatcaggctgccgccattgtcggtcgcggctttcatcgccaccatacgggcggcctgctcgctggccaggttttcaaccacgccctgataaacctgagattcgacataacgacgcagcagggtatccagcaacgccttcggatcgggttcgtacaggtaatcccaggatttatgtttcagatcatcatcatctgatgccggtaacggcagcagctggctgatggtcggaacctgagacatggtgttaataaatttgttgctgacaatgtaaagcttgtccagacggccttcgtcgtaggcctgcaacatcacttttaccggaccgatcagttcggacagggaagggttatcccccatgccggtgacctgggcaacaacattgccgcccacggagttgaagaacgacacgcctttcgagccgatcattgcgaggtcgcattgaacgcctttgtcggtccaggtcttcatttccgccagcagttttttgaacaggttaatgttcaaaccaccgcacaaaccacggtcggtcgacaccaccaggtagcccacgcgtttaacgtcgcggtcttccaggtaagggtgcttatattccagattaccgtgtgcaaggtgaccaatcactttgcgcatggtttctgcataaggacggctggccgccatgcgatcctgcgatttacgcattttggaagcggcgaccatctccatcgctttagtgatcttttgcgtgttctggacgcttgcgatcttactacgtatctcttttgcgccggccatgagcttctcctcaatgccttgcggcctgccctaaggcaagccgccagacgttaccaggattgggttgctttgaaggaatcgaggatgcctttcagcttgccttcgatttcgtcgttgtagccaccggtctggttgatctcttgcatcaacggagcgtgatcacggtcgacgtaagccagcagagcggcttcgaagctgccaattttcgacagttcaacatccgccaggtaaccacgttctgctgcgaacagaaccagagactgctgcgcaacggacatcggcgcatactgtttctgtttcagcagttcggtcactttctgaccgtggtcaagctgcttacgtgttgcatcgtcaaggtcggatgcaaactgagagaacgctgccagttcacgatactgtgccagagcggtacggataccaccggacagttttttcatgatcttggtctgtgctgcaccaccaacacgggatacggaaatacccgggttaaccgcaggacgaataccggcgttgaacaggttggtttccaggaagatctgaccatcggtaatggagattacgttggtcggaacgaacgcagaaacgtcacccgcctgagtttcgataatcggcagtgcggtcagagaaccggttttccctttcacttcacctttggtgaaggcttcaacgtattcggcgttaacacgtgcagcacgctccagcagacgagagtggaggtagaaaacgtcgcccgggaatgcttcacgtcctggcggacgacggagcagcagggagatctgacggtaagcaacagcctgtttagacaggtcatcgtaaatgatcagcgcatcttcaccgcggtcacggaagtattcgcccattgcgcaaccggcatacggtgccaggtattgcagtgcagcggattcagacgcggttgctaccacaacgatggtgttagccagtgcgccgtgctcttccagtttacgtaccacgttagaaatggtggacgctttctggccgatagcgacatagatacatttgataccggaatcgcgctggttgatgatggcatcgatagccagtgcggttttacctgtctgacggtcaccgatgatcaattcacgctgaccacgaccgattgggatcatggagtcaacggctttataaccggtctgtaccggctgatctacggactgacgttcgataacgcccggagcgattgcttctacagcagagaagccgtcgtgatccagcggacctttaccgtcgattggtgcacccagagtgttaaccacacggcccagcaggccacggccaaccggaacttccaggatacggccagtacacttaactttcatgccttcggcaaggtcagcgtacggacccataacaaccgcacctacagagtcgcgctcgaggttcagtgcgatagcgtaacggttacccggcagggagatcatttcaccctgcatacaatcggccaggccgtgaatgcggataacaccgtcacttacagaaacaatagtaccttcgttgtgagcttcactcacaacattgaactgagcaatgcgctgcttgatcagttcgctgatttcggtggaattcagttgcatgctccagtccccttaagactgcaagacgtctgcaaggcgctcaagacgaccgcgtacgctgccatcaatgaccatatcacccgctcggatgataacgcctgccattacagacttatcgattttgcaattcagcttaactttgcgtgacagacgtttttccatcgcagcagaaattttcgcgagctgttgttcactcagtgcggcagcggaaatgacgtctacctcagcggtagcctcactcacggcacgcaggtgaataaactgctccagaacatccgggagcgcgttaagacgaccattttcagccataacccgaatcaggttctgaccgttttcgtccagttgctcaccacaaactgcgataaacgactcggcgagcgtttctggcgcaagcgcgccagagagaagctctgccatttgttcgtttttggttacctcggcggcaaacgccagcatgtcctgccagcgttctacactttggtgttcgacggcaaagtcaaaagctgctttggcgtaggggcgagctaccgtaataaattcagacatcagcccctccctccttacagttcagcgacaagtttatccacgatgtcgctgttagcagcttcatccacggaacgttcgatgatcttctcggcgccagcaacagccaggatagcaacttgcttacgcagctcttcacgggcacgtttacgctcggcttcaatttccgcctgcgcctgggccacgattttagtacgttcctgttctgcctcagctttcgcttcgtccagaatctgcgagcggcgtttgttcgcctgctcgatgattacctgggcttccgctttcgcttttttcagctggtcggtcgcgctggcctttgcaaggtcaaggtccttatgtgctcgttctgcggaagcaaggccgtcagcaatttctttttgacgtttttcgatggctgccattaatggcggccatacgtacttcatgcagaacagaacgaacaggacaaacgcgatggcctggccgaggattgttgcgttaagattcacagcacaatgcctctatttagttaacgttctgatattgctctttaaataaaagcaacgcttactacgcgacagcgaacatcacgtacagacccagacctacagcgatcatcgggatagcatccaccagacccataacgataaagaactgagtacgcagcagaggaatcagatcaggttgacgcgctgcgccttccaggaatttacccccgaggatgccgataccgatcgcagcaccgattgccgccagacccatcatcacagcggcagccatgtacagcagatccatattcaggttttccatgacagtctccagtttgtttcagttaaaacgtagtagtgttggtaaattaatgttcttcagacgccatcgacagatagacgatcgtcagaaccatgaagatgaaggcttgcagcgtaatgatcaggatgtggaaaatggcccacggcacattcaggatccactgtgaccaccacggcaacagaccagcaatcagaatgaaaatcagctcaccggcatacatgttaccgaacagtcgcaaaccgagtgaaactggtttggacagcaggcttaccccttcaaggattaagttgacaggaatgaacgcccagtgattgaacggctgcagcgtcaactctttcgtgaagccgccgatgcctttcattttgatgctgtagaacagaatcaggataaatacgcccagtgccatagacagcgttacgttcacgtccgcagacggaaccacacgcagtgcaggcagacccagtacatgttcagcaatgtacggcagcaggtcgataggcagtaaatccatcaggttcatcaggaatacccagacgaagatcgtcagggccagcggagcaatcagcttgcttttgccatggtacatgtctttcacgctaccattaacaaagccgatcaccagctcaatcgcggtctgaaacttacctggcacaccgctggtcgcctttttggctacgctacggaataaaaccaggaacaacagacccagcaccaccgagaagaacatggagtcaatattgattgtccagaaggtggctggggggttttgtggatccaccagcgagaatgtacgcaggtccagctgaaggttattcaggtggtgtcctatgtaatcctgcggcgtcatattttctgaagccatgatgccttttaccctttgttgttaattacagccggtgccagtatctgaaccaccagcaccaaaacccacgtaacgatcagcggcaagaataccgcctttaaaaccgccaacgccaccaccagtaacaccaacatcgccagaactttgaaagcttcgccaaatgcgaatgtccaggccacccggcctttcgctggtgtatgcgcctggtgacgccaggcaaatatcataaacaaaacgttaggcagaaagactgccaggcccccgcttattgcagagacgccccagaaggggtctttgaggctgaacagcaatccacttgctatcaccaccagtaactgaacgagcagaagcttccgagcaacgtttcgactcacgagcgacacagacatcacgtttttcactcctgctcccttcgaggtatgccgcgtgtcgtataaaactttctttaaggcttagagtcaagcatcaaaaagcggtcaaattatacggtgcgcccccgtgatttcaaacaataagtagccaaaaggtgaataaatgtttaaatatttttccagtgcatacaattgcgacttttctgctaaccctgttcgatcatgaaaaactgtaaataacgcgtaaacactggtgataaagcgtgcttcagatcacatattgcgcatgttcgcgcacagcatatttatttacttggcaaatgatgcctttgcaagtttatgatatttcagtctaaaaacagatactgttttaataaatgacatttacacaacaaaaaccacccattgacatttttaataatgttttaacagccaatgatggttcttagcgccgatttttagcagactgatattttcactaatgacttattttctgcttaccaaaaaaagccacgttatcttgttgatgcaaaagagtgaacgtggcgttaaatgtaaccagttatatcagtagaaaacctggttgttgttaacagtctaaccggtcaattttttatgatttttttgataaaaattaaattttatttgctttaatcaccaccagatgacgttcgccatccagggctggaacctgaagtttaaccactgattcgacctgatattcttcgggcaacaaagcgatttcatcttccggcatttgccctttcagcgcgtagaaacggccttgctcaccaggaagatggtggcaccagctcaccatatcgttcagagaggcaaaagcgcggctaattacgccatcaaatggcggctctgaaggaaactcttctaccctgctctgtactggttcaatattctccagtttaagctcatgttgcacctgacgaaggaaacgcacgcgtttaccaaggctatccaacagagtgaaatgggcttcaggacgcacgatagagagtggaatgcctggcagtcctggtccggtgccgacatcgataaaccgttcaccttgcagatacggtgccaccacaatgctatcgagaatatggcgtaccagcatctcattaggatcgcggaccgaagtcaggttgtacgctttgttccatttatgcagcatattcacgtaggcaataagctggtttttctggtgatcggtaagcgaaatacctgcgtctttcagcagtaaggagagtttgttgagcacggtgattacctgttcttgatgcgttgcctggtaagcgggtgcttaccaggcatttttaatgcgttatgcgctacgacgcagcataccctgttttttcagccacaccagcagaatggagatggccgcaggcgtgacgccagaaatacgcgaagcttggccgatagaggctggtttgtgatcgttaagtttggcgatcacttcgttagaaagaccggatacctggcggtaatccagtgtcgcgggtagcagggtgttctcgttacgcagctgcttttcgatctcatcttgctggcgcgcgatataaccttcgtatttaacctgaatctcaacctgttccgccgcctgttcgtctgtcaacgcaggggcaaacggcgtcagcgtggttaatttttcataagtcatttccggacgacgcagcagatcttcaccactggcttcacgggaaagcggcgcagtcaggtgagcattcacttcggctgcagcttccgccgacggggttacccaggtcgatttcagacgctgacgctcacgctcgatattctcaagtttctcgttaaagcgcgcccaacgttcgtcatccaccaggcccagttcacgaccgatttcagtcaaacgcagatccgcattatcttcgcgtagcatcagacgatattctgcgcgcgaagtaaacatacgatacggttctttggttcctaaagtgcacaggtcatcaactagtacgccgagatacgcctgagaacgtgccggagcccaaccttctttgtcagcagacagacgggcagcgttaagaccggccagcaaaccttgcgcagcggcttcttcgtaaccggtagtgccgttaatctgaccagcaaagaacagcccctggataaacttgctctccagcgtcggtttcaggtcgcgaggatcgaagaagtcatactcaatggcataacccggacgcacgatcttcgcgttttccatcccctgcatagagcggacgatttgcatctgcacatcgaacggcaggctggtggagataccgttcggataaatttcattagaggtcagtccttccggttcaaggaagatctgatgctgatttctgtcggcgaagcgcatgactttgtcttcgatcgacgggcagtagcgtgggccgacaccttcgatcacccctgcgtacattgggctacgatcgaggttactgcggatcacatcatgggttttctcgttggtatgagtgatataacacggcacctgctggggatgctgggacgcattgcccataaacgagaataccggcattgggttatcgccatgctgttgcgccagtacgctaaagtcgatggttcgagcatcaatacgcggtggtgtcccggttttcagacgaccaacgcgcagcggcagttcacgcaaacggcgagaaagcggaatggacggcggatcaccagcacggccaccgctgtaattatccagaccgatatgaattttaccgtcgaggaacgtcccaacggtgagcacgacggctttggcacggaacttcagtcccatttgggtaacagcaccgaccacgcgatcgttttcgacaataagatcttcaaccgcctgctggaagatcatcaggttcggttggttctccagcgccgtacgtaccgcctgacggtagagcacacgatccgcctgagctcgggtagcgcgaaccgccggtcctttgcttgcgtttagtatcctaaactggatacccgcctgatcgatcgctttcgccatcagaccgccgagtgcatccacttcttttaccagatgtcccttcccaataccgccgatcgccgggttgcagctcatctgccccagagtgtcgatattgtgtgtcaaaagcagagtctgttgacccatacgcgccgcggccatcgcggcctcggtgcctgcatgacccccgccaatgatgatgacgtcaaaaggatccggataaaacatggtgattgcctcgcataacgcggtatgaaaatggattgaagcccgggccgtggattctactcaactttgtcggcttgagaaagacctgggatcctgggtattaaaaagaagatctatttatttagagatctgttctattgtgatctcttattaggatcgcactgccctgtggataacaaggatccggcttttaagatcaacaacctggaaaggatcattaactgtgaatgatcggtgatcctggaccgtataagctgggatcagaatgaggggttatacacaactcaaaaactgaacaacagttgttctttggataactaccggttgatccaagcttcctgacagagttatccacagtagatcgcacgatctgtatacttatttgagtaaattaatccacgatcccagccattcttctgccggatcttccggaatgtcgtgatcaagaatgttgatcttcagtgtttcgcctgtctgttttgcaccgaaatttttgagttctgcctcgagtttatcgatagccccacaaaaggtgtcatattcacgactaccaataccgattgcgccaaagcggaccgcagaaagatcgggcttctgttcctgcaatgcttcatagaaaggagaaaggttgtccggaatatctccggcaccgtgggtggagctgataaccagccagatccctgaggcaggtaaatcttctaacagcggaccgtgcagcgtttcggtggtaaaacccgcctcttccagcttttcagccaggtgttctgctacatattcggcaccgccgagggtgctgccgctgataagagtgatatctgccataaaccgccacctttattaagagtggcgtattgtacgctgtgaacgcgttgggatctacctgtggaaaagtatgggattaaaaaagccgatcagggcttgatggtacgcatgatcgggttttgcaggacgatcaatgtctcggtggactgaatttcatcaattgtttggatcttgttgataagtacatgctggagagcgtcgatcgaacggcacatcacttttataaagatgctgtagtggccggttgtgtaataggcttcagtgacttcatcaaggctttccagctttgccagcgcggaagggtagtctttggcgctctttaatataatgccgataaagcagcctacgtcataaccgagttgcttcgggctgacatcaatacgcgccccggtaatgatccccgcctgcttcattttctctactcgaacgtgaatcgtccccggactgacgccaaattgtttcgccagttcggcgtaagcggtgcgcgcattgcccattaatgcttccaggatgccacggtccagattgtcgatcagataattttccataggattttcttatgcagattgatgattcattctattttagccttcttttttaatgaatcaaaagtgtgttaggctttttattgaatgattattgcatgtgtgtcggtttttgttgcttaatcataagcaacaggacgcaggagtataaaaaatgaaaaccgcttacattgccaaacaacgccaaattagcttcgtgaaatctcacttttctcgccaactggaagaacgtctggggctgatcgaagtccaggcgccgattcttagccgtgtgggggatggcacgcaggataacttgtcgggctgtgaaaaagcggtgcaggtaaaagtgaaagctctgcctgatgcccagttcgaagtggttcattcactggcgaagtggaaacgtcagaccttagggcaacacgacttcagcgcgggcgaagggctgtacacgcacatgaaagcccttcgccccgatgaagaccgtctttctccgttgcactcggtctatgttgaccagtgggactgggaacgcgtaatgggcgacggtgagcgtcaattctcgactctgaaaagcacggtagaggcgatctgggcgggaattaaagcaaccgaagctgcggttagcgaagagtttggcctggcaccgttcctgccggatcagatccacttcgtacacagccaggagttactgtctcgttatccggatcttgatgccaaatggcgtgagcgggcgatagcgaaagatcttggtgcggtattccttgtcgggattggcggcaagctgagcgatggtcatcgccacgacgtgcgcgcaccggattatgatgactggagcaccccgtcagagctgggccatgcgggtctgaacggcgatattctggtgtggaaccctgtactggaagatgcgtttgagctttcttccatggggatccgcgtggatgccgacacgttgaagcatcagttggcgctgaccggtgatgaagatcgtctgcagctggaatggcatcaggcgctgctgcgcggtgaaatgccgcagaccatcggcggcggtatcggccagtctcgtttgaccatgctgctgctgcaactgccgcatatcggccaggttcagtgtggtgtatggccagctgctgttcgcgagagcgtcccttctctgctgtaataatttatcgccgccagcgtctgagcaggcggcttcgcatcccggtatcaaagcgccagatatgatcgaaaatgcgcatgatgccgggtttgccgtgtgccgacatcgccacggcatgaaagcgatgctgatgtacccgctgcagctctttcactttactcgtcacgtcgtcaggcaaccgctgagcgataaaatcagaaatcaccaccgcatcggcatcaaaccattccctgctttgcaagcgttccataatggcgcgaaaacaactggcaagatcggtgccgccacgaaactgctggcttaaaaaacggattgcttgttcgatgccttgtgggcctgaaagctcataacggacgatctcggtggaaaatagcataatatagcagcgccggttttctgcgagagcaatgcgcatcaaggccaggcagaacgctttcgcacactgttcattaaagccgcccattgagccggaagtatccacacagacaataaacggcccgcgcggctgttcatcgtaatctttatgtaccaccggacgttcgatcactttttcacgccacgactcaccgtgcaggcgataggtgagcaactgtttttccaccagccgacggtaaaactcatactccagttccgttatccctagtgtcgccagttctggcggcaggagacgtaaaatatcatcgctttgttgcagaccatcaacctgctcaggaaccgtcgccggttcgcgcaccatggtgcggaaggtttccatctgcgcatcgttgcgcggtattgatttggcttcccgagaacgccccagctgctctgccaggcgtttcagttccggctgttcgttaagaaattcaccgtatttcacaatcaactgatagtcgccacgtttaagctgaccggcgctcatatcccacagacgaccagctgcagtattgttatctgcgagaatcggttcaagttgtccgctcagcgtcatgcgttcctgaacttcactcaacagttgttcgcgttcttcttctaatagctgttgatttaacgtcgttgcttgcacgatcagacttaaacgccaacgctggagaaaaagcgtgtgtaacgctgaagtgatcgtgctgttagcatcaaccaactgtcgggcttgttctgcccatggagaattcagacgatgcagtaagtccaggatctgtggtagctgcacaataaactgtggcgtggagaggagctggctttgctgatagcacatcacctcttcggtgagttccggcgggactcgggcatctttcagccgactgcgcagcgcttcacgccagcggggaacatcatcagtgattgccgccttcaggcgtgggaatttttcaaagaagaccgccagctgcggtgaggccagcagtgcgatgatcatctcttcgatcaatccctcttcgctgacggccagcatcacattaagcgtatccagcgttagcattgttgtgcctggcgaatctgtgcaccgacatcctgtaggctggcttcaatgcgacctaaccagtcgccagggataaacagacatttttgctgttcgctgaataaagcgtgttgcttgcgccagtcgctttcaagctcttccagttgttgttttatttcaccaggcagaccttcagccgatgaaccgggaagtgccagcgtactgccttgtaaacttacatcgcgaacgacaagatgttgggcgctatcaacttccagattcagtttctgggcaaagccgataccgttcagtttaccgcgaatttcaccacctttgctcagccactgttccagcgcgctacgctcaaaggagatatgaaccacttccatatcatgcagttttaacggtttttgcagcagtagagtcagagtggaagcagtaacgttaacaggaagttgatactgctgacgacggctgaaaatgccgcccagacgaattaccgttaaggctgttttatcgctttgttgctgctggagttgcaggtgacgttgcacaatcgcgccaaggcgagtcaacatcccttgctgttgccaggcgtgaccggtcatcaatacatcaatttgttgttgtatcaaattcaggctttgcgcgtcataccacaggcaatctttcagcaaaatgagatctaccggggcaacagcactgcgaccgctaaaaaaggcgctggcctgtaataatcggatcgcttttttccagcgacgatccgagacataaggcgcatccggtaatttatccagttgctggcgcagcataaaaatcagctcaaatacatgatcgggcagcgtaatttcaccaatctctttctgccagcgttcatattcttcatctgtgacctgcaaggcatcaggaaccggattgtcgttttcatcctgttgactggtcagcatggagcggaaattcgctttatcctgcactttatctaaccacagacgaatcagcatgcggtcatataacgcttccagactgctgtctgcttccggcagctcgttggaggccgccaccagcaggcgcatcgggattttttctacgtgtgcaccgttgcggaactggcgctcgttaatggcggtgagcaaggtattaagaattgccgggcccgctttccagatctcatccagaaagacaatttctgcttccggcaggtaaccgctggttaaacgttcatagcgcccttcatcttttagcgcctgaatagaaaggggaccaaaaacttcttccggcgtggagaagcgggtcatcagatattcaaacgcgcgggcattctgaaaggcgaattttaagcgccgggcgatcaaacttttggcaatacctggcgggccaaggaggaacacactttcaccacttaatgccgctaataaacacaagcggatggcgtggctacgttcataaagccccttttccaacgaactgctcaggcgggaaattctttccgctaataaatgagggtgagccataatgaagtggcgtcctttcgtcaaaagttctgcgtaaattgcgagtatagacgtttcttgctggtggctaaaatagtctcaaagggggggtatttttctttgagccaggttaatgtggccgcatttaggagtacgattttgccgttaatcgtgcatactgtgcgcttttttgtgggccaagggactaagcacacatttcatatttcaacgaaagactagtctatgagcactgataataagcaatcattgcccgcgattaccctcgcggcgattggagttgtctacggcgatattggtaccagcccgttatatacacttcgtgaatgtttgtccggccagtttggttttggcgttgaacgcgatgccgtgtttggctttttatcgctgatcttctggctgctaatctttgtggtttccattaaatatctcaccttcgtgatgcgggcagataacgccggtgagggggggatcctgacgttgatgtcgcttgccgggcgtaatacgtcggcgcgaaccacatcaatgctggtgattatggggctaatcggcggcagctttttctatggtgaagtcgtcataacacccgctatttcggtgatgtcagccattgaaggtctggaaatcgtcgccccgcagctggatacctggatagttcccctctcaattatcgttctcactttattatttatgattcaaaagcatggcacggctatggtcggtaagctgtttgcgccgatcatgctgacctggtttttgattctggcaggactggggttacgtagcattattgctaacccggaagtgctgcatgcgctgaatccgatgtgggcggtgcatttcttccttgaatacaaaacggtttcttttattgcattaggggcagtggtgctgtcgattacgggggtcgaggcgctgtatgctgatatgggacactttggtaagttccctattcgtctggcgtggttcactgtcgtattaccttccttaactcttaattacttcggccagggagcgctgttgttaaagaacccggaagcgattaagaacccgttcttccttttggcaccggactgggcgctgatcccgctgctgatcatcgccgcactggcgacggtaatcgcctcgcaggcggttatctctggcgtcttttcattgacgcgtcaggcggtacgtctgggatatttgtcgccgatgcgcattattcacacctccgaaatggagtcagggcaaatctatattccgtttgtgaactggatgctctatgtcgcggtcgtgattgtgattgtcagctttgagcactccagcaacctggcggcggcgtacgggattgcggtgaccggaaccatggtgctgacgtctattctctcgactaccgtggcacgtcagaactggcactggaataagtattttgttgcgctgatcctgattgctttcctttgtgtcgatattccattgttcaccgctaacctcgataaactgctctccggcggctggttgccattgagcctcggtactgtgatgtttatcgtgatgaccacctggaagagcgagcgtttccgcttgctgcggcggatgcatgaacatggtaactctctggaagcgatgattgcttcgctggagaaatcaccgcctgttcgcgtgcccgggaccgcggtgtatatgtcgcgtgcaatcaacgtcattccctttgcgctgatgcataaccttaaacataacaaggtattgcatgagcgggtgattctgttaactctgcgcaccgaagacgctccatatgtccataacgtccgtcgggtacagattgaacaactgtcgcccactttctggcgcgtggtggcaagttatggttggcgagaaacgccaaacgtagaagaagttttccaccgctgcggtctggaaggattaagttgccggatgatggaaacctccttctttatgtcgcatgagtcgttgatcctcggcaaacgcccgtggtatttgcgtctgcgcggcaagctgtacttgctgctgcaacgtaatgcgctgcgtgcaccagatcaatttgaaatcccgccaaacagggttatcgaactgggtactcaggtcgaaatctaacgccagacgcctcctttcttcataagggggcgtttttgttttcatggttaatcaccatgtaaaacgtttcgaggttgatcacatttccgtaacgtcacgatggttttcccaactcagtcaggattaaactgtgggtcagcgaaacgtttcgctgatggagaaaaaaatgaaaaaaggcaccgttcttaattctgatatttcatcggtgatctcccgtctgggacataccgatacgctggtggtgtgtgatgctggtttacccatccccaaaagtacaacgcgtatcgatatggcattaacccagggtgtaccttcttttatgcaggtgctgggcgtcgtcacaaatgaaatgcaggtcgaggcggccattatcgcggaagagatcaaacaccataatccgcaactccacgaaacgttgctcactcaccttgagcagctgcaaaaacaccagggaaataccattgaaattcgttacaccacgcatgaacaattcaaacaacaaaccgcagaaagtcaggcggtaattcgcagcggagaatgttctccgtatgcgaatatcattctctgtgctggcgtgacgttctgaggccgtcatggaagcattacttcagcttaaaggcatcgataaagccttcccgggcgtaaaagccctctcgggcgcagcgttaaatgtctatccgggccgcgtgatggcgctggtgggcgaaaacggcgcgggtaaatccaccatgatgaaagtgcttactggcatctatactcgcgatgccggtacgcttttatggctggggaaagaaacgacatttaccgggccaaaatcttcccaggaagccgggattgggattatccatcaggaactgaacctgatcccgcagttgaccattgccgaaaacattttcctcggtcgtgagtttgttaatcgctttggcaaaattgactggaaaaccatgtatgccgaagcggataaattgctggctaaacttaacctgcgctttaaaagcgacaagctggtgggcgatctttccatcggtgaccagcaaatggttgaaatcgccaaagtgctgagctttgagtcgaaagtcatcattatggatgaaccgaccgatgcgctgaccgataccgaaaccgaatccctgttccgcgtcatccgcgagctgaaatcgcaaggccgcggtattgtctatatctcccaccgcatgaaagaaatcttcgagatttgcgatgacgttaccgtttttcgtgatgggcaatttattgctgagcgcgaagtggcatcactgaccgaagattcgctgattgagatgatggtgggtcgcaagctggaagatcaatatccgcacctggacaaagcgccgggagatatccgcctgaaagtcgataatctctgcggacctggcgttaacgatgtctcttttactttacgcaaaggcgaaattcttggcgtctctggtttgatgggcgcaggtcgtaccgaactgatgaaagtgctctacggcgcactaccgcgcaccagcggttacgtcaccctggatgggcatgaagtcgttacccgttcaccgcaggatggcctggcaaacggcattgtgtatatctccgaagaccgtaaacgtgacggtttagtgttgggcatgtcagtaaaagagaacatgtcgctgacagcgctgcgctacttcagccgcgctggcggcagtttgaagcatgccgatgaacagcaggctgtgagtgatttcattcgtctgtttaatgtgaaaactccgtcgatggaacaggcaattggtctgctttccggtggcaatcagcaaaaagtggcgattgcccgcggtctgatgacacgccccaaagtgttgatccttgatgaacctacccgtggcgtagatgtcggcgcgaaaaaagagatctatcaactgattaaccagttcaaagccgatggcttgagcatcattctggtgtcatcggagatgccagaagtattaggcatgagcgatcgcatcatcgtcatgcatgaagggcatctcagcggggaatttactcgtgagcaggccacccaggaagtgttaatggctgccgctgtgggcaagcttaatcgcgtgaatcaggagtaaaaaaatgacaacccagactgtctctggtcgccgttatttcacgaaagcgtggctgatggagcagaaatcgcttatcgctctgctggtgctgatcgcgattgtctcgacgttaagcccgaactttttcaccatcaataacttattcaatattctccagcaaacctcagtgaacgccattatggcggtcgggatgacgctggtgatcctgacgtcgggcatcgacttatcggtaggttctctgttggcgctgaccggcgcagttgctgcatctatcgtcggcattgaagtcaatgcgctggtggctgtcgctgctgctctcgcgttaggtgccgcaattggtgcggtaaccggggtgattgtagcgaaaggtcgcgtccaggcgtttatcgctacgctggttatgatgcttttactgcgcggcgtgaccatggtttataccaacggtagcccagtgaataccggctttactgagaacgccgatctgtttggctggtttggtattggtcgtccgctgggcgtaccgacgccagtctggatcatggggattgtcttcctcgcggcctggtacatgctgcatcacacgcgtctggggcgttacatctacgcgctgggcggcaacgaagcggcaacgcgtctttctggtatcaacgtcaataaaatcaaaatcatcgtctattctctttgtggtctgctggcatcgctggccgggatcattgaagtggcgcgtctctcctccgcacaacccacggcggggactggctatgagctggatgctattgctgcggtggttctgggcggtacgagtctggcgggcggaaaaggtcgcattgttgggacgttgatcggcgcattaattcttggcttccttaataatggattgaatttgttaggtgtttcctcctattaccagatgatcgtcaaagcggtggtgattttgctggcggtgctggtagacaacaaaaagcagtaataacgactacaggacatcttgaatatgaacatgaaaaaactggctaccctggtttccgctgttgcgctaagcgccaccgtcagtgcgaatgcgatggcaaaagacaccatcgcgctggtggtctccacgcttaacaacccgttctttgtatcgctgaaagatggcgcgcagaaagaggcggataaacttggctataacctggtggtgctggactcccagaacaacccggcgaaagagctggcgaacgtgcaggacttaaccgttcgcggcacaaaaattctgctgattaacccgaccgactccgacgcagtgggtaatgctgtgaagatggctaaccaggcgaacatcccggttatcactcttgaccgccaggcaacgaaaggtgaagtggtgagccacattgcttctgataacgtactgggcggcaaaatcgctggtgattacatcgcgaagaaagcgggtgaaggtgccaaagttatcgagctgcaaggcattgctggtacatccgcagcccgtgaacgtggcgaaggcttccagcaggccgttgctgctcacaagtttaatgttcttgccagccagccagcagattttgatcgcactaaaggtttgaacgtaatgcagaacctgttgaccgctcatccggatgttcaggctgtattcgcgcagaatgatgaaatggcgctgggcgcgctgcgcgcactgcaaactgccggtaaatcggatgtgatggtcgtcggatttgacggtacaccggatggcgaaaaagcggtgaatgatggcaaactagcagcgactatcgctcagctacccgatcagattggcgcgaaaggcgtcgaaaccgcagataaagtgctgaaaggcgagaaagttcaggctaagtatccggttgatctgaaactggttgttaagcagtagttttaatcaggttgtatgacctgatggtgacataaatacgtcatcgacagatgaacgtgtaatataaagaaaagcagggcacgcgccaccctaacacggtggcgcattttatggacatcccgaatatgcaaaacgcaggcagcctcgttgttcttggcagcattaatgctgaccacattcttaatcttcaatcttttcctactccaggcgaaaccgtaaccggtaaccactatcaggttgcatttggcggcaaaggcgcgaatcaggctgtggctgctgggcgtagcggtgcgaatatcgcgtttattgcctgtacgggtgatgacagcattggtgagagcgttcgccagcagctcgccactgataacattgatattactccggtcagcgtgatcaaaggcgaatcaacaggtgtggcgctgatttttgttaatggcgaaggtgagaatgtcatcggtattcatgccggcgctaatgctgccctttccccggcgctggtggaagcgcaacgtgagcgtattgccaacgcgtcagcattattaatgcagctggaatcaccactcgaaagtgtgatggcagcggcgaaaatcgcccatcaaaataagactatcgttgcgcttaacccggctccggctcgcgaacttcctgacgaactgctggcgctggtggacattattacgccaaacgaaacggaagcagaaaagctcaccggtattcgtgttgaaaatgatgaagatgcagcgaaggcggcgcaggtactgcatgaaaaaggtatccgtactgtactgattactttaggaagtcgtggtgtatgggctagcgtgaatggtgaaggtcagcgcgttcctggattccgggtgcaggctgtcgataccattgctgccggagatacctttaacggtgcgttaatcacggcattgctggaagaaaaaccattgccagaggcgattcgttttgcccatgctgccgctgcgattgccgtaacacgtaaaggcgcacaaccttccgtaccgtggcgtgaagagatcgacgcatttttagacaggcagaggtgacgcttggctacaatgaaagatgttgcccgcctggcgggcgtttctacctcaacagtttctcacgttatcaataaagatcgcttcgtcagtgaagcgattaccgccaaagttgaagcggcgattaaagaactcaattacgcgccatcagctctggcgcgtagcctcaaactcaatcaaacacataccattggcatgttgatcactgccagtaccaatcctttctattcagaactggtgcgtggcgttgaacgcagctgcttcgaacgcggttatagtctcgtcctttgcaataccgaaggcgatgaacagcggatgaatcgcaatctggaaacgctgatgcaaaaacgcgttgatggcttgctgttactgtgcaccgaaacgcatcaaccttcgcgtgaaatcatgcaacgttatccgacagtgcctactgtgatgatggactgggctccgttcgatggcgacagcgatcttattcaggataactcgttgctgggcggagacttagcaacgcaatatctgatcgataaaggtcatacccgtatcgcctgtattaccggcccgctggataaaactccggcgcgcctgcggttggaaggttatcgggcggcgatgaaacgtgcgggtctcaacattcctgatggctatgaagtcactggtgattttgaatttaacggcgggtttgacgctatgcgccaactgctatcacatccgctgcgtcctcaggccgtctttaccggaaatgacgctatggctgttggcgtttaccaggcgttatatcaggcagagttacaggttccgcaggatatcgcggtgattggctatgacgatatcgaactggcaagctttatgacgccaccattaaccactatccaccaaccgaaagatgaactgggggagctggcgattgatgtactcatccatcggataacccagccgacccttcagcaacaacgattacaacttactccgattctgatggaacgcggttcggcttagatttacgctgtcttttgatcaaattattaccatcggttgttttcagaagcatgaacattgctgctgaagcaacagtaataatgcccattgtgataaacgtatagtggaattgttcgacagtcgttgtgccttccattccttcataaacgcgaaggacggccgcacttacagcaacgcctaaactaatcgacagttgctgcgtgaccgccagaacactgttaccgctgctggcattgtcatcggtcagatcggcaagtgtgatggtattcatcgcggtaaactgcgtcgacatagccatccctaatataaacaacggcaagatcagcatccatatagccattgctggtgattgcaaagagaactgagcgatcattagcccaataatcaccgtgatccccactaacgtatggcgatagcccagacgacgtaagacttgggtaaccatcgattttgcaataatggaacctaacgctgtcggtgccatcatacagccagcaataaacgcctgataaccaaatcctacctgtaacatcaatggcataaggaacggtacacagccggtccccagacgggttgcaatattgcctacgataccgatcgagaaagtgcgggttttaaataaatctaatgaaattaatgggtttggcgtgcgtcgtgcatggagaatatagagaagcagtaacccgatgctggtgacaattaccgtcaaggcaatccagctggcgacaatcttttccccgaatagctctattccgcttgagaagagaacaaggctgaggccaaacagcaaaaagccagtgatatcgaatctgcgtcgtgcggtggtgaaattgggcatatgtttgcgcgcgtaaagaaggcccgcaatacctatggggatattgattaaaaatatccagtgccaggttgcccaggtgaccagcacgccgccaagaacggggcctaaaattggccccaccagacccggcatggcgacaaaattcaatactggaagaagttcattacgaggataagcgcgcagtaaggccagccgagcaacaggcatcatcattgcgccgcctatcccctgaataacccggaagacaaccagctgtggtagcgaattagaaagtgcgcaggccagagaacccaatgtgaacagactcacggcaagggtaaaaatgcgacgcgtaccgaagcgatcggctagccatccgcttaccggaataagcatcgccaccgtcagcgtataactgatgatggctgattgcatcgcgagaggagaacgattaaggctatgagcgattgcgggtaaggcggtattaagaatagtggcatcaagtgcctgcatgaagaaggccatcgccgcgatccacggcaaacccgccatactgcgcttctttttatcgctcattcaatgtcctgttatcgggttatcacttatcaggtgagcgtagcagcgcctgacaagctttaaatgccgcgtcgccatcgctttggataatcgcatcgacaatcgcctgatgcagatccagctttatcactgtgtcgctggtaattgacgtgaagtaagtgtgataaaccgaatggaatagcgaggcgaatgaggtcaaaaacggattggcgctcatttcatagatatgctcatgccaggccatatcgacttcgatccagcgttcacggcgaaagttctcttttaatgccgccatttcggccattaacgtattgagatgcgctttctgttccgcggtgccaaccgttgctgccagtaggcaggcttgcggctccagacagatacgcataaccagaaagtgatcgatgacctgatgaaagttctcttctgtcatccaccaggtaagcaattcctgatcaagaaaattccagttcgattgtggcatgacccgagtaccaattcgcggtcgcggtaaaaccatcccttttgccgttaacgttttgaccgcttcgcgtaccgctgtacgactcactccaaattgctcgcccagctcaatctcaccgggcaaaatggtgccgggttcatattcaccttttaagatccgttgcgccagcttctcagccagaacatacgaaaggtttttctgtgcagctaactgttgtgcgcttaaaggcattacttatcttcctttttctttttattcctccttagtatgccaccaggaagtgtgattacggttgcaaaaacggcaaattgcttgttttatggcacattaacggggcttttgctgaaaaaatgcgcggtcagaaaattattttaaatttcctcttgtcaggccggaataactccctataatgcgccaccactgacacggaacaacggcaaacacgccgccgggtcagcggggttctcctgagaactccggcagagaaagaaaaaataaatgcttgactctgtagcgggaaagcgtattatacacaccccgcgccgctgagaaaaagcaaagcggcactgctctttaacaatttatcagacaatctgtgtgggcactcgaagatacggattaatattgggccgttggtggagatataagtggatcacttttcatccgtcgttgacaagtgttggcatcgcacgataattatcgcgttctgctttagggtcatttcccagtgcaatcgcctccttgtgacgacgagctatctgacgggctgtccccacatcgatttcagggaatctgccaatactgatactttttttggtaccgtggaatgtgtagcgcaggaggaaacgtttgttacccgttcgacctgagagacatttgaggcctatgacctcggtatctgatacctcaagctctgtagatcgggtatctgtgtttgccggaagggctttgatggatgaattggtgaatcggaaggatttttgcatatttatcctcatgtatctgattgatatcatgaaaataatatatatctgaaggtgtttttattacggggcaggattgaagaatggaaaagctattagacgcgtacaaacggatattgcaggaagttaacgcccagtcatttaacctgaatgaggataaatactcaggcgtctttttacccgtgccgtttgaagaatactggcattcaccgataaaaatcatgctggttggacgtgaaaccgcaggctggaatacgctgaatggtaagaatacgatatcacgggtgttgggacttatacctgacgtcaccatcgggcaagtggttgaagaagctgtagatcgttacaggaaacatcttccggtacaaaattatggcaccgccaacctcaaatcacgtagccgcttcacgcaatatcatttcaggctggcccgggagcttaatattcttccccaggcaatcgtgtatgccaatctactggcgtgggattacgacggactgacccctctcaatcgccctcaaaatgaagtgcaggaagtcatattagcctcgctgaagctactggcggtacaaattaaacaccttgagcctgatttcatcatctttgcatctggagcccggagaacagactacatcataaaacaggtgcttactgagctaggcggctatgagacttcttcagtcattccggggaagctgtgggagttcaaaacaggtaatacaatctgtttcagaattgcccatccaagggctatgcgcggacaccagaagtacagagatgaggtgattgcacgaattaagcaactttgtactcagggtggctagagcattacagcttgctcagcagggccccttcccggaagagtaccggaaaacaggcaaagcaacctggttctctatgctggaggcgacacgttcgattcggcattgccaggctggagattgcagctcattgcaccccgtgagcacaggatatgcacaggacatgaatttcaggcacaaaaaaaccacccgaaggtggtttcacgacactgcttattgctttgattttattcttatctttcccatggtacccggagcgggacttgaacccgcacagcgcgaacgccgagggattttaaatcccttgtgtctaccgattccaccatccgggctcgggaagaaagtggaggcgcgttccggagtcgaaccggactagacggatttgcaatccgctacataaccgctttgttaacgcgccaaattcttcaggcctttcagccagacatccgctgacgccgatgtcttttaaactggagcgggaaacgagactcgaactcgcgaccccgaccttggcaaggtcgtgctctaccaactgagctattcccgcattcatcaagcaatcagttaatcacttgattttattatcgtctggcaatcagtgccgccgttcgatgcgttgcattctacttacctggcgcgatgagtcaacgatatttttcaccacttttgatcgtttgctgaaaattgcgccgaaacgatcactgatcaagcaaatctgcacgcgcagcgctcaaatattgcaacattgaccacagagtcagtaccgcagccacaaagaaaagtgcaataccggcgtactcaacccaaatgttcggacgccacagcagccatgccaacgccaccatctgggcagtggttttcactttcccaatccaggagacagccacgctactgcgtttacccaactccgccatccattcgcgtagcgcagaaataataatttcacgggcgatcatcgttgccgccggtaaggtcacccaccagctgtggtaatgctcggttaccagcaccatggcgatagccacgagaactttatctgctacagggtcaaggaaagcaccaaaccgggtactctggttccagcggcgtgccagaaaaccatcgaaccagtcagtcaccgccgcgacgcagaaaatgagcgcggcggcaaacggcgaccaggtgacaggcagataaaagaccaatacaaagaatgggataaggatgacacggaacagtgtaagcaacgtagggatattaaattgcataatgacgggtaactatctgttgtcagtaagattacccctatgttgctacagagacatcaatgtttcaacgaccagaagatcttttctgccagaccttgcgaaatacccggcacttttgcaatttcctcgacgctggcgttacgtaaaccttgcaaaccgcccatatatttcaacaacatttgccggcgttttggcccgacgccttcaatggtttccagggaactggtatttttgaccttcgcccgttttttacggtgcccgccaatcgcgtgatcatgtgattcatcgcgaatatgctggataacatgcagcgcgggagaatctggcggcaaactgaatccctcaccttccggctcaaagaacagcgtttccagcccagccttacgatctgctcctttggcaacgccaagtagcagcggatgatttttatcccatgagacatccagttcggcgaaaacatttttcgcctgcgcaagctggcctttgccgccgtcgataagtatcacatccgggatcttactgtcgtcgatggctttaccataacgccgacgcagcacctgattcatcgccgcataatcatcgcccggcgtgatgccagtaatgttatagcgccgatactccgcacgcagcgggccgttagcatcaaacaccacacaggaagcgacggtttgttcacccatggtatggctgatgtcaaagcactccatccgcttcacttccggcaatttcaacacgctggcaagtgctgtaagccgctggtgaacggtagattgctgcgaaagtttgctggttaaggccgtcgccgcattggtgcgcgcgagtttcagataacgcgcccgatcgccgcgaggtttggtttgaacattaatcttgcgtcccgccagttctgaaagggaatcggcgagcagcgttttatcgctaagattaaaatcgagcaggatctcacccggtaaggtgcgcatctggctgccttgtaaatagaactgtcctacgaaggtttccaccacctcgctcagttccgtaccgccaggcactttcgggaaatagctgcggctaccgagcactttgccctgacgaatgaacaatacgtggacacaagccatgcccgcatcgaacgccacaccaataacgtcaaggtcgtcgccggtattggacacaaactgtttttcggtgacgcgtcgcaccgcctgaatttggtcgcggatacgtgccgcttcttcaaactccagattctggctggcagtttccatacggctaatgagttgcgtaagcacctgatcatctttgccagacaaaaacaggcgcacatactcgacctgctgagcgtattcttcttcactcaccagtccttcaacgcacggccccagacagcgccctatctgatattgcagacatggacgcgagcgattgcgataaacactattttcgcactggcgaatggggaaaatcttttgcagtagcgccagtgtttcacgtacggcatagccattcgggaacgggccgaaatattcacctttggcatgcttcgcaccacgatgcatcgccagacgcgggtgggtatcgccactcaggaagataaaaggatatgatttatcatcgcgtagtaaaacgttgtaacgcggctgatagagtttgatgtagttgtgttccagcaacagcgcttcggtttctgtatgagtaaccgttacatcaatttgctggatctgggcgaccagcgcttcggttttgcgcgaagcgaggttgctacggaaatagctggaaagccgttttttcaggtctttcgctttgccgacatagataaccgtaccaccagcatcgtacatgcgataaacgccaggctggctggttacggtttttaaaaacgcttttgcgtcaaactgatcactcactgacttgataatgtctccgcattacacagaccatggcgaattgccaggtgagtcagctcaacatcgccatgaatgtttagtttactgaacatacgatagcggtagctgttcaccgttttcggactgagattgagctgttctgagatctcattgaccttctggcccttagtgatcatcagcataatctgcaattcacgttcagacaaactggcaaatgggctttctgttttttctggttcgatctggcttaacgccatttgttgagcgatgtcagaagcaatgtaacgctgccctgaatagacagaacggatcgcactcacgacttcctgcggagccgcgcctttgctgaggtagcccgcagcaccggcctgcatgactttcgctggtaaagggttttctgtatggacggtaagcatgatgatttttacatcagctgtggaacgcgcgattttacgcgtcgcctcaagaccgccaatgcccggcatactcatgtccattaacaccacgtcaacggcatttgcccggcaccacttaacggcgtcttcaccgcacgatgcctcaccgacgacttttataccctttatatcttccagaatgcgtcgtatccctgcgcgcaccagttcgtggtcatcaacaagtagaacgttgatcaaaggaatatctccagaaatagggataacgctactgatagttagtcattcgtatattagcggtttttattgcaactttgaaacgttaaaaatggtgggtattcgatttttctctcgtttttgtcaattcgattgtccacagttatggtcacgcccgtcaccaacggcttaccggatcgtttcacagtaagccctgcgacgaaatgtgacaaaaattacctttattcagcaaaaatgaaaatcagcccgctgaatatgtaacattaattaacccgaacaatacgggcaaaaaacattcatgataaaaatatttattggtcattatattaacgcatttaatagcaccgttgacggcacgctcaaaaaacaaccactgctatttttagcaaagcttatggtatactccgccgccttaacatttttcaccgcaaattttcattgcaacatgacgaggaaaataaatgagtacgcctgatttttctactgccgagaataatcaagaactggcaaatgaagtctcctgcctgaaagcgatgctgacgctgatgctgcaggcgatgggacaagctgacgcgggccgcgtgatgttaaagatggaaaaacagcttgcgctgatcgaagacgaaacccaggctgcagtattttccaaaacggttaagcaaattaaacaagcctaccgtcagtaatataaaaccggctgagagcgtgcctttcagccggtttttgcatctgacacgcaggacagaaaagagatcaaattaagccagtagcggccgcgtaacaggcaacctgggtcttatttggtgcattaatttttttctgcatgtttttctggtggaaattgaccgtattctcagagattgacaaaatcatcgctatctctgctgatgtcttcccttccgccgtccacctcagaatttctttttcgcgcttgctgaaattcatctctggcgtcatcactatttcatcatttaaacgcatcagagccatcagactttcgcgcaccagtaactgcatttttaattgcagttcatcactaagaatgggtatttcgcgcgcgctgctacgggaaaaggacaaaaagcccagcgcccggtttggcagcattaaatactgagtgacaccgcggcgtaaaccatgtgcgcgcgcggcttcccataacggctgtgcttcgctgaataagtcatcattccacattaaatggccctgactaaagttttcagggttcagcaccggatcaattgcgagaaagttttttgcctgataataactaacccacgcctcagggtaattggtgtagaaagccactttaggtcgcgtgaatggtaccgggtggcgaacacataacgaatagtaatcgtactctagctgctgagcctgaagctctatttcatggtagacctcttctgcggcctccatcctctgaaaacgcaacagcatcgtgcgacgccagctgaaaaaatccgtatcctgcatagtaaaccgcaacgcccctgagagtgagtatcatttataatgataattcaaactatcacataaataagatttatatataatttatattattcaggcaatgaattacttttgcaagccatcgcattctcttatgttattaatgagttatgctgatttgttaagctgttttatcacgcttgaaatggcgtcccgccccgacaggtgaatcgtcggggctgattttttcttattattgcagcagaaacttctcgaggaactggcgggtgcgaggctgctggggatcggcaaataacgcttttgctgccccctgctcgactatccgcccctggtccataaaaatcgcccggtccgcaacatcccgggcaaagctcatttcgtgcgtcacaatcaccatcgtgcgcttttcctgcgccagctgacggatggtgttcaggacttcgcccaccagctctggatccagcgccgacgttggctcgtcaaacaaaatcacctcaggacgcattgccagcgcacgtgcaatcgcaacacgttgctgttgaccgccagacaaacgacgtggatagctggtttctttaccggccagcccaactttcgccaacagctcgcgagcgcgcgccgtggcctcttctttcggttcgcctttgacgatcaccggcccttcaataatgttttccagcaccgtacgatgcggaaacaaattaaagttctggaagacaaacccgacgtgctgacgcaactggcgaatcagcgatttttgctgacttaatgaacgtgcagtatcaatagtgatatcgccaacggtgatagttcccgcttccggttgttccagcagatttatgctgcgtagcaacgtggttttgccggaaccactcggaccgataattgccaccacttcgccaggctttacctcaaggtcgataccgtgcagcaccgtctgaccgtgaaattttttcaccaggttcttaacttcaatggcactcattttggttctctctcctggcgattaagttgattctcaaaatggttctgcaacgtcgataatactgtcgccatgatccagtagatgagcgaagccgccaggtacatggtgaacacctccagcgtgcgcgaggtaatcaactgcgcctgacggaacagctccggcacctgaattgtcgcggccagcgacgtatcttttaccaggctgataaagctgttcgacagcggcggcaacgccacccgcgccgcctgtggcaaaatcgcgcgacgcatagtctgccatggcgtcataccaatactggcagctgcttcccactgacctttatcaatagaagaaatggcggcgcgcagcgtttcggcagcataggcggcagtgttgagcgacagaccaatcattgctgacggaatgggatctaattcgataccaaactgcggcaggccgtaatagatcataaacagttgtgcgatgagcggtgtaccacgaaaaatagagatataaaaacgcgccagccagcgcacgggccagattggcgacaggcgcatcagcgcgagaataaacccgagcagtaagccaaaaaacatgccgccgatactgagttgcagcgtatacccagcccctttcagcaggaacggcaaggaatcaataaccagttgtatactttcttgcatgagcgttcccggagctaaacgtggggatgataggcgaacagcgcaggcgcaccgccggtatgaataaacagaatcggcccttcatctttgaaacgtttctgactgataccgtcaatcagacccgccatcgcttttccggtatacacaggatcaagcagaatgccttccagccgcgccagcaatttcactgcttccatgccttcgtcgttcggcacgccgtagccaggtgcaaaatagtcatcccagagtaaaatttccgctgatgcggtcagctccagttctttcgcaatcgcctgttgtaggttaaccactttcggcaattgatcggcaacggaacgcgacacggtcacgccaatcagttcgctttcaggcatcaggtgttccagcccaacagccagtccggcgtgagttccggcactgcccgatgcgaccaccaccgacgaaatattaaccgccccttcacactgttgcgcgatttccagcgcactctccacataacccagcgcgcccagagcattagaaccgccaaccggaatgacatacgggcgaaagccttgtgcttcgactcgcgtcgccagctcttccagttgggcattgggatcggtcagtgcgtcgcacatttcaatctgggtattgaacagatccagcaacaagcgattgccgttggttaaatagttttctgcggttgtgccaataggattttccagcagcgccacgcagtgcagaccgagtttggcagcgactgcggcagtctggcgcacatggttagactggatcgccccggcagtaatcagcgtatcggcaccttcgcgcagagcatctgccgcgagaaattctagcttacgtaatttattgccgcccattgccatgggggtgacgtcatcccgtttgatgaaaatttcccgtcctagataatcagaaaagcgcggcagatattcgagcggcgttggcgcgccgataaactccaaccgtggaaaacgggttaaattatgcagtggcataacagcctccgatgtgtgttgttgtgattttcttattatgcacgctgaaaacgcgtaaataaaaaaggcgctagtgaaagcgcccttttttgtcattatgctgattatttggtcacatcagcaccaaaccatttttcggaaagcgcttgcagagtgccgtctttttgcatttccgcaattgcatcattcaccgctttcagcaggtcttcatttcctttacgcagcgccacgccagactcctgacgggagaatgcttcaccggttactgccagcgtatcgttggttttcttcaccagatccagcgccgccagacggtcaacgaggatcgcatcgatacggcctacgcgcagatcctgatatttggtcgggtcatcatcataggtacgcacatcgacaccctgaacattctgccgcagccactcttcatagttggtgcccagaccgacacccacttttttgcctttcagatcagcagctgttttaatggtgccttcgttaccttttttcaccagcgcctgaatgccggaaatggtgtaaggggtagagaaatcgtattttttcttgcgctcgtcagaaatggtgacctgattaatcaccacatcaatgcgtttagaatccagcgacgccagcataccgtcccatttggtcggttttagggacgcctcaacgccaagatgttttgccagctgttgggcaaattccacttcaaaaccggttaatttgccgtcatccccctgaaaactgaacggcggataagttccttccagacctaccagcagcgtgccgcgctctttgactttattaagcagaccttcatctgcaaaacttttaacgctcatgcccgcaaccagcgccacggccatcacacccatcaatgcctgacgtcccagatgtgctaatttcatattcaccccgaatgttgttatgtctgtttgcagtgtagagccattgtttgtaaacacaaaaacaactccgctacatcttattcttatttaatatatatcagaagaaggcaggctggaggatttctgcacaagtccggtacaggtttggcgctgatagtgttgatacttccgtaacgcgatgcggtaattgttggtgctggtggtgggcagccacggggcgaggatttcatcaaggaaaccgtcctgcagctgttcgagggaaatattttgctcgtgtagatgattccccaaacggcgcaaacgaacgacatattcacgcaccgtacctgggctcatttcagtttgctcaaaaagaaattgcttaaagccgataatatcgaaaaaatcactctgcgttttgcagtgtaaatcaccgcaaaatcggcacaatgccgcccatgattgttgttccacttgccagccattttcatcaagcagcgtgtccaggcgggaaatctcgattttattcactattttgccgtcgcgaactaaggtaatgcgatcgagtaatttacggcaatgcgcacaatgggtctggctgtgtttaaagtctttaagatagcggcttaatggccgtcttttcaggtgctgcaccatcattaagaactcctggtagtcaaagttaaagtgcggcatttactgacgttataacttacccagtttagtgcgtaaccgtttaatggcctggctgtgtaactgactgacccgcgattccccgacctccagcaccgcgccaatctctttgagattcagctcttcctggtaatagagggttaataccagtttttcgcgctccggcagcgtttcgatagcttccatcacccgctggcgcagattactgtccagcagttgttgtagcgggttttctcgctgatgatcatcagtaaccagttcgatgctatcgccgtgctcttcgcgccactcatcgtaggagaagagctggctgttattggtgtcgagcaacatttggcgataatcggcaatatcgatccctaaacgttccgctacctcagtttccgtggcgttgcggccaagttcctgctccagttgccctattgcctgtgccacttcacgcgcgttgcgtcgcacgctgcgcggcacccagtcacggctgcgaagttcatccagcatagcgccacggatacgctgcactgcgtaagttgtaaatgtcgttccttgtagggcgtcatagcgttcgacggcattaagtaacccaatgccgcccgcctgtagcagatcgtcaagttccacgctcgcgggcagtcgaacctgcaggcgcaatgcttcgtgacgcaccagcgggacataacgctgccacagcgagtgtttatccattacaccttcagcggtatagagtgaattcacgataaacagccctgcgttatatgagttatcggcatgattatccgtttctgcagggtttttaatcggacgattagtgggtgaaatgaggggttatttgggggttaccggtaaattgcgaacagaaaaaaccccgccggtggcgggggagcacgttgctgacaaattgcgcttcatgttgccggatgtggcgtaaacgccttatccggcctacaaaaatgtgcaaattcaataaattgcagttcaccttgtaggcctgataagcacagcgcaccaggcaatttggcgttgccgtcagtctcagttaatcaggttacgacgattaaccctgcagcagagacagaacctgctgcggtacctggttagcttttgccagcacggagttaccggcctgctggatgatctgcgctttcgacatgttggacacttcggtcgcatagtcggcgtcctgaatacgggactgcgcttcggacaggttggtagtggtgttgttcaggttggtgactgcggaatccagacggttctgcacggcacccagggaagaacggaatttgtctacggatgcgatagcatcgtccagcgctttcagcggatccgtggtcgcttcagatttacctgtagcttcagtggtcagagagccgtcagccgctttatacagagccgcgccgtcatcatccagaatattgccgttagcaaattcgtgataagtttctgtgacagtcttgttggccgcagtcgtcagttcaccctcagcaccaatatttacggtcgctccacctgtagtagcagttactgcaccatcagcggcaacgtcataagactgtgcgccgttagctacggtataagcctgaccggttaacgcagtgttcatatcttcggcggataccgtcgcgcccttaatatccacattgttgctaacctgggtgaagtcaacggtcatgccgctgccgaaggtaatcttcgcatcaactgcatcatgaccattcgcaccgttgaaaataccgtccaacgttgccgcggctgggccgccggcctggtttttcgtcaggttaccgtcagcaccaatgtataaagcatcgccattagtatccgtcagggtaccatcgctggcaattttaacttcctgagcgctaccaccgatggagatctgagccgtgttatcgccgtttgctgcataggctttcagaacatcagcaactttagttgagcccgcagtaccatcaccattagtaagtgcggttgcgtcaaatgaataagacttgctggttgcgttgtaggtatatgcagtagaagccgctacgcctaacccattgtttgtgccagcataaccgctaatagtgctgccgccactaacgctagccagcacatcggtagctgttgctgcattaaaggtagtaacagtagatttagtccaggtgctattgccactgacaactgcactttgggagaagcccgcagcggtcagatctgcttcagtggcttttgcattatcaacagcgcctttaccgttgacgttgaagctggtcagcttcagtgtagaagagtcgatttttttcaggtcaatcgtgatggtttcaccatcatttgcgcccacctgaattttcattgaaccgtctttggacaacacattcacgccattgaactgggtctgaccagatacgcggtcaatttcatcaagacgagatttgatttcgtcctggatggagtccaggtcagaatcggagttagtaccggtagtggcctgaaccgtcagttcacggatacgctgtaagttgttgttgatttcggacagcgcgccttcggtggtctgcgcaacggaaataccgtcgttggcgttacgtgcagcctgagtcaggcctttaatgttagaagtaaaacggttagcaatcgcctgacccgcggcgtcatccttcgcgctgttaatacgcaagccagaagacagacgctcgatagaactcgacagcgcagactggttcttgttgatattattttgagtgatcagcgagaggctgttggtattaatgacttgtgccatgattcgttatcctatattgcaagtcgttgattacgtattgggtttccacccgtcggctcaatcgccgtcaaccctgttatcgtctgtcgtaaaacaacctttagaatttttttcacaaacagccattttttgttagtcgccgaaatactcttttctctgccccttattcccgctattaaaaaaaacaattaaacgtaaactttgcgcaattcaggccgataaccccggtattcgttttacgtgtcgaaagataaaaggaaatcgcatggcaagtatttcatcgctgggagtcgggtcaggcctggatttaagttcaatccttgatagcctcaccgccgcgcaaaaagcgacgctaacccctatttcaaatcagcaatcgtcgtttaccgctaaacttagcgcctacggtacgctgaaaagcgcgttgacgactttccagaccgccaatactgcattgtctaaagccgatcttttttccgccaccagcactaccagcagcaccaccgcgttcagtgccaccaccgcgggtaacgccatcgccgggaaatacaccatcagcgtcacccatctggcgcaggcgcaaaccctgaccacgcgcaccaccagagatgatacgaaaacggcgatcgccaccagcgacagtaaactcaccattcaacaaggcggcgacaaagatccgattaccattgatatcagcgcggctaactcgtcgttaagcgggatccgtgatgccatcaacaacgcaaaagcgggcgtaagtgcgagcatcattaacgtgggtaacggtgaatatcgtctgtcagtcacatcaaatgacaccggccttgacaatgcgatgacactctcggtcagcggtgatgatgcgctacaaagttttatgggctatgacgccagtgccagcagcaacggcatggaagtctcggtcgccgcccagaatgcgcagctgacggtcaacaacgtcgccattgagaacagcagcaacaccatcagcgacgcgctggaaaacatcaccctgaacctgaacgatgtcaccacgggcaaccagacgctgaccatcactcaggacacctccaaagcgcaaacggcgattaaagactgggtgaatgcctataactcgctaatagataccttcagcagcctgaccaaatacaccgccgtagatgcgggagctgatagccaaagctctagcaatggcgcactgctcggcgactccacgctgcggacgattcagacgcagttgaagtcgatgctgagtaataccgtcagttcttccagctataaaacgttggcgcagattggtatcacgaccgatcccagcgatggcaaactggaactggatgccgacaaactcaccgctgcactgaaaaaagatgccagcggcgtaggtgcattgattgttggcgatggtaaaaaaaccggcatcacaaccaccatcggcagcaacctgaccagttggctttcgacaacgggcattattaaagccgctaccgatggcgttagtaagactctgaataaattaactaaagactacaacgccgccagcgatcgcattgatgcgcaggtcgcgcgctacaaagaacaatttacccaactggacgttttaatgacctcgttaaacagcaccagcagctacttaacgcagcagttcgaaaacaacagtaattccaagtaatcaatattcatcgggagacaggtcatgtacgcggcaaaaggcacccaggcctatgcacaaattggcgtcgaaagcgccgtaatgagcgccagccagcagcagctggtcaccatgctatttgatggagtgctgagcgcactggttagagcgcgcctgtttatgcaggacaacaatcagcaaggcaaaggcgtctctttgtcaaaagcgatcaacatcattgagaacggactgcgggtgagtcttgatgaagatagcaaagacgaattaacccaaaacttgattgctctttatagctatatggtcaggcgtttgctgcaagccaatttacgcaacgatgtctccgcagtcgaagaagtggaagcattaatgcgcaatattgccgatgcctggaaagagtcgttactctccccttctttgattcaggacccagtctgatgaaccatgcaccgcatttgtatttcgcctggcaacaactcgtcgaaaaaagccagctcatgttacgcctggcaacggaagaacaatgggacgaactcatcgccagcgaaatggcgtatgtgaatgcggtgcaggagatagcacacctgactgaagaggttgccccgtccaccacgatgcaggagcagctccgcccgatgctgcgcctgattctcgacaacgaaagcaaggtaaagcagttattacagattcgtatggatgaactggcgaaactggtcggtcagtcatcggtgcaaaaatcggtgttaagtgcctatggcgatcagggcggctttgtgctggctccgcaagataacttctcgtgaatcttaacgagctaatggttcgcgaataatccgattacggctacgcttctaatgttccccttgaatggagtcgaagaatgcgtaatcccacgctgttacaatgttttcactggtattacccggaaggcggtaagctctggcctgaactggccgagcgcgccgacggttttaatgatattggtatcaatatggtctggttgccgcccgcctataaaggcgcatcgggcgggtattcggtcggctacgactcctatgatttatttgatttaggtgagtttgatcagaaaggcagcatccctactaaatatggcgataaagcacaactgctggccgccattgatgctctgaaacgtaatgacattgcggtgctgttggacgtggtagtcaaccacaaaatgggcgcggatgaaaaagaagctattcgcgtgcagcgtgtaaatgctgacgaccgtacgcaaattgatgaagaaatcattgaatgcgaaggctggacgcgttacaccttccccgcccgtgccgggcaatactcacagtttatctgggatttcaaatgttttagcggtatcgaccatatcgaaaaccctgatgaagatggcatatttaaaattgttaacgactacaccggcgaaggctggaacgatcaggttgatgatgaattaggtaatttcgattatctgatgggcgagaatatcgattttcgcaatcatgccgtgacggaagagattaaatactgggcgcgctgggtgatggaacaaacgcaatgcgacggttttcgtcttgatgcggtcaaacatattccggcgtggttttataaagagtggatcgaacacgtacaggaagttgcgccaaagccgctgtttattgtggcagagtactggtcgcatgaagtcgataaactgcaaacgtatattgatcaggtggagggcaaaaccatgctgttcgatgcgccgctgcagatgaaattccatgaagcatcgcgcatggggcgcgactacgacatgacgcagattttcacgggtacattagtggaagccgatccttttcacgccgtaaccctcgttgccaaccatgacacccaaccgttgcaagccctcgaagcgccagtcgaaccgtggtttaaaccgctggcgtatgccttaattttgttgcgggaaaatggcgttccttcggtattctatccggacctctacggtgcgcattacgaagatgtcggtggtgacgggcaaacctatccgatagatatgccaataatcgaacagcttgatgagttaattctcgcccgtcagcgtttcgcccacggtgtacagacattatttttcgaccatccgaactgcattgcctttagccgcagtggcactgacgaatatcccggctgcgtggtggtcatgtcgaacggggatgatggcgaaaaaaccattaatctgggagagaattacggcaataaaacctggcgtgattttctggggaaccggcaagagagcgtagtaaccgacgaaaacggtgaagcgaccttcttttgcaacggcggcagcgtcagcgtgtgggttatcgaagaggtgatttaaattcatccccggcggcaagccggggagatttcattacggcagtggcgtcggtaacggcgctttatccagcgcagcggcacactctgccgtcgggcgatccacacgctccatcgtcataccatcgtactcaatggtgttaccgtcacgctcaacctcgtacagctcacgttttacggtaacgttagtgagatcatctgacatcaatgtcaacttgcccggcacggcaatcacccgctgccactgacggcaatccagggtatcgccctctttagtgacaatcaggctgcctatcgcttccggactgaccagcgcacgttgcggccctttggtctgccagtagcccgccagccagtccggcgcgggggttttcacgacattgttatagttttcgacttcggcacagcccgccagcaacatgagcgcgcctgcaattgcgagttttttcatcattcgtcctgcatgagaagaaaagaggattgtggcattaaagccctgatgtcgccagcctttccaggttcagagagaaatttgatctaactattatttttgtgaattattaccccgaaaataaatttgcatggtgtatgattcgcgactcttgtttcaaaccttctgagttcagaggctacattcatgtcatggcagcaattcaaacacgcctggttgattaaattctgggcgcccatccccgcggtcatcgcggcgggtattctctccacttactattttggcatcactggcaccttttgggctgtcacgggtgaatttacccgttggggcggtcagcttctgcagctgttcggcgtccatgctgaagagtggggttattttaaaattatccatctggaaggatcgccattaacccgcatcgacgggatgatgatcctcggtatgtttggcggctgctttgccgcagcgctgtgggccaacaatgtcaaactacgcatgccgcgtagccgtatccgcattatgcaggccatcattggcggcattatcgccggttttggcgcgcgtctggcaatgggctgtaacctggcggcattctttaccggtattcctcagttctcgctgcatgcctggttctttgccatcgccactgccattggttcatggtttggcgcgcgctttaccctgctgcccatcttccgtattcccgtgaaaatgcagaaagtttctgccgcctcaccgctgacgcaaaaaccggatcaggcgcggcgtcgttttcgtctcgggatactggtctttttcggcatgctgggctgggcgctgctcacagcgatgaaccaacccaaactggggctggcaatgctgtttggcgtcggctttggtttactgattgaacgtgcacaaatctgctttacttcggcgttccgcgatatgtggatcaccggacgtacccatatggcgaaagcaatcattattggtatggcggtgagtgccatcgggatcttcagttacgtacagttaggcgttgaacccaaaatcatgtgggcgggaccaaacgcggtaattggtggtttactgtttggttttggcatcgtgctggctggcggctgcgaaaccggctggatgtaccgcgcggtagaaggccaggtgcactactggtgggtcggtctgggcaacgtgatcggctcaacgattctggcgtattactgggatgatttcgctccggcgctggccaccgactgggacaaaatcaacctgctgaaaacctttggcccgatgggtggcctgctggtgacatatttgctgttgtttgctgcgctgatgttgattatcggctgggaaaaacgcttcttccgccgtgcggcaccgcagactgctaaggagatcgcatgaaaaatatcgttcctgattaccgccttgatatggtgggtgaaccctgcccttatccggcagtcgcaacccttgaggcgatgccgcagttaaaaaaaggggaaatcctggaagtggtgagcgactgtccgcagtcgatcaataatattccactggatgcgcgtaatcacggctatacggtgctggatattcagcaagacgggccgaccattcgttatttaattcagaagtaatccctcattcccgctgtggcccacagcgggaatatcgttgcctctgtaccacatagattttacccgccccctctcctattcttttcagtgtgctctcaggaggtttctatgtgtggacgctttgcccaatcccaaacgcgtgaagattaccttgcgcttctcgctgaagatattgaacgcgatattccctatgatcccgaacccattggcagatacaacgtcgcgccgggaaccaaagtccttctgctcagtgaacgtgatgaacaccttcatctggatccggttttctggggatatgctcccggatggtgggataaaccgccgctgattaacgcccgcgtagaaactgcggcaaccagtcgtatgtttaaaccgctctggcaacatggtcgggcaatctgttttgccgatggctggtttgagtggaaaaaagaaggcaacaaaaagcagccttattttatctatcgtactgatggacaacctgtttttatggccgcgataggtagcacaccattcgagcgcggtgacgaagccgaaggatttttgattgtcactgcggcggcagatcaaggtctggtagatattcatgaccgccgcccactggtactgtcgccagaagctgcgcgggaatggatgcggcaagagattagcggtaaagaagcctcagaaattgctaccaatggctgtgtgccagctaaccagttcacctggcacccggtatcgcgcgcggtgggtaatgttaaaaaccagggcgcagcgttaattcaacctgtctgttaaccctggagattattgataaactaaaatgtgtcacaagaaacctctattccagtgacacaattgcgcctaattacttacatataatatttaattaggtgatcctcaccatctattacatactttttaaccatatcggaatatttatcataatcatcggggttcgtaacaatatatttccgctgcgatatttcatagcaaatccctgtaagagtccatggcattaaaaatgcctctttaataggattacattccatgaaaagtaattttaaattgccaggtatcgcaggaataacctcaattttattatattcaatatgcacttctttcagatttttggggaaccatctaatttcctttatattattctcactacaatcaaaaaccttagcggtgtctggtattgttggtatttccgatagcttattgtgacaaatagaaattatcttagcctttggcggaaatgagtcaatatgcgatatcaggttattatttacggagatcagggtaattnnnnnnnnnnnnnnnnnnnnnnnnnnnnnnnnnnnnnnnnnnnnnnnnnnnnnnnnnnnnnnnnnnnnnnnnnnnnnnnnnnnnnnnnnnnnnnnnntggcggaaatgagtcaatatgcgatatcaggttattatttacggagatcagggtaattccatcaggtacttgtggaaattctgtaaggttattgaaatcgacttctaattctttgcatgattcgggcacatgtattgaatcaagttcattttcaataaggctaagcatttcaatccactcgggaagaggcggtacagaacccaaaaatagggatgataagtcaagttcattattgtggagctcaacacatttaaacattctcagcaatgccctatccacattttctttgaagtcattggatgcgccttctttgactgaactagcccagtcactgaaacctttgcaaagtctggcatctgtaattttggttaacttgtccagcaactctgcaatattggtcgatataaactctaatttatgtcgaatgggtaaagtcccctccccctgacttttttctatcgtgatagaccccgtcttatcataagccccataattttcaaacaatagagtataattaccccacctgaaacattgctctctcaataacttaaattctgacagcatattcagtaatttgccgtcttcactaattggtgtaaacttaccatttccaagacaactgactaactcacttgataattcatttatgattgcatcatcagatactaactcgtgttgttttatcgtagattcagtattagatgtgactttatttaattgaaccgactgagtttttaacgaaagatcatttaatggaaacatttacactcctgtttaataaattatattgcccagggcgcattctaaaacacaatgaaattaccactatcaaaaatcgctcatatccatagcccggaatatgaataaaaacatcaacaaagattaaattattcaaacgttactgttgcgtctgtggtcgtaacaacatccgacgtggtgatgtgtgtcaaatgagacactctgatgatcagagggtttatcgtgtatacggatcgtggatggcagaaaacgttcaggatcaggtatccattttaaaccagataatgagtaagtttgccccatccatgccccacgcggtgagatcggatgtcattaaaaaagtcaggtcagcaggtcagtatgggaaggcgaacaactcgcaggaattggtgcgctgaagttgctggatgataaacatggcgaactgaaatcaatgcgtaccgcgccaaattatttacgtcgaggtgtcgccagtctgattttatgccacattttgcaggtcgcccatgacagatgccttcatcgcctgagcttagaaacgggtacacaggctggatttacggcctgccatcaactttatttgaagcatggtttcgttgattgcgaaccgtttgccgattatcaacttgatccacacagtcgatttttgtcattgacgctatgcgaagataatgagttgctttgagccagacgcagcacattcttgcattcgacgtgctgcgcctttatttgtcaccagcaggaaacgccttgtccatagacgccacttctacatgcgccacaagaaacctctattccagtgacacaattacgcctaattaattacataaataaattatttaattataaccatctattactatctttttaaccatgtaagaatatttatcataatcatcgggattcgtaacaatatattttctctgcgatattccataggtaatgtctgtcaaagtccatggcattaaaaatgcctctttaataggattgcattctataaaaagtaatttcaacttgctatgtatcgcaggaacagcctcaatgttattatactcgataagtgctttctccagattttttggaaagtatcgaatttcttgtatcttattacagccacaatcaaaaacctcagtggtatctggtattgctggtatttccgatagcttattgtgacggataaaaatttccttaatcttcggcggaaatgagtcaatatgcgatatcaggttattatttacggagatcagggtaattccatcaggtacttgtggaaattctgtaaggttattgaaatcgagttctaattctttgcatgattcgggcacctgtattgaatcaagttcattttcaataaggttaagcatttcaatccactctggaagaggcggcacagaacccaaaaatagggatgataagtcaagttcattattgtggagctcaacacatttaaacattctcaccaatgctctatccacattttctttgacgtcattcgatgcgccttctttgactgaactagcccagtcactgaaacctttgcaaagcctggcatctgtaattttggttaacttgtccagcaactctgcaatattggtcgatataaactctaatttatgtcgaatgggtaaagtcccctccccctgacttttttctatcgtgatagcccccgtcttatcataagccccataattttcaaacaatagagtataattaccccacctgaaacattgctctctcaataacttaaattctgacagcatattcaataatttgctgtcttcactaattggtgtaaacttaccatttccaagacaactgactaactcacttgataattcatttatgattgcatcatcagatactaactcgtgttgttttatcgtagattcagtattagatgtgactttatttaattgaaccgactgagtttttaacgaaagatcatttaatggaaacatttacactcctgtttaataaattatattgcccagggcgcattctaaaacacaataaaattaccactatcaaaaatcgctcatatccatagcccggaatatgaataaaaacatcaacaaagattaaattatccagaggttactgttgcgtctgtggtcgtaacaacatccgacgtggtgatgtgtgttaaaggagacgctctgatgttcaggggggtatcgcgtatacggatcgtggatggcagaaaacgttcaggatcaggtatccattttaaaccagaaaatgagtgagtttgcctcatccatgccccacgcggtgagatcggatgtaatcaacaacaggttacaaaacctacacctgcatgctcatcacttcctgatacgccgccaccagcttattacgcacctgaatccccatttgcagagaaactgaggctttttgcatatcggtcatcacatcgtttaacgccacgccgggttcaccgagagtgaatttttctgcctgcgtgcgggcggctgtttgtgtatcgcttatgcgatcgagcgcggcgtgcagctgcccggcaaaactaatggtcggttgcggcagtgattcctgcccacgcgcactcatcgccgtagcctgtaactggctgataaccccttcaatcccctgtatcgctgacattttcgtctcccggataatttctggtagcaaagcctaccagtaagtcaataagacaaaggcgctaaatagcaacaaaaaaacgggtttattggcggatagaaaaaaacgaaagcacaaataatgggagcgtcaatttttcgagtttgctgacccgggagtgagtcttgttccactttgccaataacgccgtccataatcagccacgaggtgcgcgatgaatgcgactgcagcccagacaaaatctcttgagtggcttaatcgcctgcgtgcgaatccgaaaattccattgattgttgccggttccgcggcagtggcggtcatggtcgcactgatcctgtgggcgaaagcccccgactaccgcacattattcagcaatctttccgatcaggatggtggcgcaattgtcagccaactgacgcaaatgaatattccttaccgcttcagcgaagccagcggcgctattgaagttccggcagataaagttcacgagctgcgtctgcgcctggcgcaacaaggtttgcccaaaggcggcgcggtcggtttcgaactactcgatcaggaaaagtttggtatcagccagttcagcgaacaggtgaattatcagcgggcgctggaaggcgagctttctcgtaccatcgaaactatcggcccggtaaaaggggcgcgcgtacatctggctatgccgaaaccctctttattcgtccgtgaacaaaaatctccttcttcatcggtgacggtaaatctgttacccggccgcgcactcgatgaagggcaaattagcgccattgtgcatctggtttccagcgcggtggctggtctgccgccgggaaacgtcacgctggtggatcagggcggacatctgttaacccagtccaataccagcgggcgcgatcttaatgacgctcaattgaaatatgccagcgatgtcgaaggccgtattcagcggcgtattgaagcaatcctgtcgcctattgttggtaacggtaatattcacgcccaggttacggcgcagctggacttcgccagtaaagaacaaacggaagaacagtatcgccctaacggtgatgaatctcaggcggcgcttcgttcacgccagcttaatgagagcgagcaaagcggttccggttatccgggcggcgtaccgggggcgttgtcgaatcaaccggcacctgcgaataacgcgccaatcagcacgcctccggcaaatcaaaataaccgccagcagcaggcgagcaccaccagcaatagtgggccgcgtagcacacagcggaatgaaaccagtaactacgaagtcgatcgcaccattcgtcataccaaaatgaacgtgggcgatgtgcaacgtctgtcagtcgcggttgtggtgaattacaaaaccttgccagacggtaaaccgttgcctctcagcaacgaacagatgaagcaaattgaagatctgacccgcgaggcgatgggcttttctgaaaaacgcggtgattcgctcaatgtcgttaactcgccgttcaatagcagtgacgaaagcggcggagaactgccgttctggcaacagcaagcgtttatcgatcagttactggctgccggtcgctggttgctggtactgctggtggcgtggctgctgtggcgtaaagcggtacgcccgcagctaacacgtcgcgctgaggcgatgaaagctgtacagcaacaggcgcaggcccgcgaggaagtggaagatgcggtggaagtccgcctgagcaaagacgaacaactacaacaacggcgcgcgaaccaacggctgggtgcagaagtcatgagccagcgtatccgtgaaatgtctgataacgatccgcgcgtggtggcgctggtcattcgccagtggataaataacgatcatgagtaacctgacaggcaccgataaaagcgtcatcctgctgatgaccattggcgaagaccgggcggcagaggtgttcaagcacctctcccagcgcgaagtgcaaaccctgagcgctgcaatggcgaacgtcacgcagatctccaacaagcagctaaccgatgtgctggcggagtttgagcaagaagctgaacagtttgccgcactgaatatcaacgccaacgattatctgcgttcggtattggtcaaagctctgggtgaagaacgtgccgccagcctgctggaagatattctcgaaactcgcgataccgccagcggtattgaaacgctcaactttatggagccacagagcgccgccgatctgattcgcgatgagcatccgcaaattatcgccaccattctggtgcatctgaagcgcgcccaggccgccgatattctggcgttgttcgatgaacgtctgcgccacgacgtgatgttgcgtatcgccacctttggcggcgtgcagcctgccgcgctggcggagctgaccgaagtactgaatggcttgctcgacggtcagaatctcaagcgcagcaaaatgggcggcgtgagaacggcagccgaaattatcaacctgatgaaaactcagcaggaagaagccgttattaccgccgtgcgtgaattcgacggcgagctggcgcagaaaatcatcgacgagatgttcctgttcgagaatctggtggatgtcgacgatcgcagcattcagcgtctgttgcaggaagtggattccgaatcgctgttgatcgcgctgaaaggggccgagcagccactgcgcgagaaattcctgcgcaatatgtcgcagcgtgccgccgatattctgcgcgacgatctcgccaaccgtggtccggtgcgtctgtcgcaggtggaaaacgaacagaaagcgattctgctgattgtgcgccgccttgccgaaactggcgagatggtgattggcagcggcgaggatacctatgtctgataatctgccgtggaaaacctggacgccggacgatctcgcgccaccacaggcagagtttgtgcccatggtcgagccggaagaaaccatcattgaagaggccgaacccagccttgagcagcaactggcgcaactgcaaatgcaggcccacgagcaaggttatcaggcggggattgccgaaggtcgccagcaaggtcatgagcagggctatcaggaaggactggcccaggggctggaacaaggtctggcagaggcgaaatctcaacaagcgccaattcatgcccggatgcagcaactggtcagcgaatttcaaactacccttgatgcgcttgatagtgtgattgcttcgcgcctgatgcagatggcgctggaggcggcacgtcaggtgatcggtcagacgccaacggtggacaactcggcactgatcaaacagatccaacagttgttgcagcaagaaccgttattcagcggtaaaccacagctgcgcgtgcatccggatgatctgcaacgtgttgatgatatgctcggcgctaccttaagtttgcatggctggcggttgcggggcgatcccaccctccatcctggcggttgcaaagtctccgccaatgaaggcgatctcgacgccagtgtcgccactcgctggcaagaactctgccgtctggcagcaccaggagtggtgtaatgaccacgcgcctgactcgctggctaaccacgctggataactttgaagccaaaatggcgcagttgcctgcggtacgtcgctacgggcgattaactcgcgctaccgggctggtgctggaagccaccggattacaattgccgctcggcgcaacctgtgtgattgagcgccagaacggcagcgaaactcacgaagtagaaagcgaagtcgttggctttaacggtcaacggctgtttttaatgccgctggaggaagtcgaaggtgtcctgcccggcgcgcgtgtttatgccaaaaacatttcgactgaaggactgcaaagcggcaagcagttgccgctcggtccggcgttattaggtcgtgttctggacggtagcggtaaaccgctcgatggccttccctcccccgatacgacggaaaccggtgcgctgatcactccgccatttaacccgttgcaacgtacaccgattgaacatgtgctggacaccggcgtgcgcccaatcaatgccctgcttaccgtcgggcgcgggcagcgtatggggctgtttgccgggtccggcgttggtaaaagtgtgctgctggggatgatggcccgttacacccgcgccgatgtcattgtcgtgggtttaattggtgaacgcggacgcgaagtaaaagattttattgagaatatcctcggtgccgaagggcgtgcacgctccgtggtgattgccgccccggcggatgtttctccgctcctgcgaatgcaaggtgccgcctatgccacgcgcattgccgaagattttcgcgatcgtggtcagcatgtgttgctgattatggactccctcacccgctacgcgatggcccagcgtgagattgcgctggcgattggcgaaccacctgccactaaaggctatccaccgtcggtgtttgccaaattaccggcactggtcgagcgtgccggaaatggcattagcggcggcggctcgattaccgcgttttataccgtgctcaccgaaggcgatgaccagcaggaccccattgccgactccgcgcgggccatcctcgacggtcacattgtgctgtctcgccgactggcggaagccgggcactatccggctatcgatattgaagcgtcgatcagccgcgcaatgacggcgttgatcagtgagcaacattacgcgcgagtgcgcaccttcaaacagctgttgtcgagttttcagcgtaaccgcgatctggttagcgtcggcgcgtatgccaaaggcagcgatccgatgctcgataaagccatcgccctgtggccgcagctggagggctatttgcaacaaggcatttttgaacgcgcggactgggaagcgtctctccaggggctggagcgtattttcccgacagtgtcataacccaggagataacggcagatgacagaacatggcgcgctggcgaccctgaaagatctggcagaaaaagaggtagaggatgccgcgcgcctgctgggtgaaatgcgtcgcggatgtcagcaggcggaagaacagctcaaaatgctgatcgattatcagaatgaatatcgcaataacctcaacagcgatatgagtgccgggatgaccagcaaccgctggatcaactatcagcagtttatccagacgctggaaaaagccattactcagcatcgccagcaacttaatcagtggacgcagaaagttgacattgccctgaacagctggcgagaaaagaaacaacgtttgcaggcctggcagacactgcaggaacggcaatccacggcggcactgcttgcagaaaaccgcctcgatcagaaaaagatggatgagttcgcccagcgcgccgccatgaggaaacctgaatgattcgcatagcgcccttgattaccgctgacgttgataacaccacattgtctggcggcaaagccagcgatgctgcacaagattttctcgcgttgttgagcgaagcattaacaggcgaggcaacaaccgacaaagcggccccccagttggtggcaacagataagcccacgacaaaaggcgagccgctggtcagcgatattgtttccgacgcgcaacaagcggatttactgatccccgtggatgaaacactgcctgtcatcaacgacgaacaatccacatcaacaccgttaaccaccgctcagacgataacgttggctgcggcggctgacaacaatacggcaaaagacgaaaaagcggatgatctgaatgaagacgtcaccgccagcctgagtgccctttttgcgatgttgccgggttttgacaatacgcccaaagtgactgatgtaccgtcaaccgtgttaccgacagagaaagcaacgctcttcacaaaactgacttctgcgcaactcacaacagcacagcctgatgacgcccccggcacaccagctcagccattaacaccgctgatagcagaagcccagagtaaagcggaagtcatcagcacgccttcgtcggtgaccgttgccgccagcccgctaatcactccacaccagacacagccactgcccaccgtcgccgcgcctgttttgagtgcaccgctgggttctcacgaatggcaacaatcattaagccagcatatttcgctgttcacccgccaggggcaacaaagtgcagagttgcgtctgcacccacaggatttaggtgaagtgcaaatctccctcaaagtggatgataaccaggcgcaaatccagatggtttcaccgcatcaacacgtacgcgccgccctggaagcagcgcttccggtactgcgtacgcagctggccgaaagtggcattcagttagggcaaagcaacatcagtggcgaaagctttagtggtcagcagcaggccgcttcccagcaacagcaaagtcaacgcacagcaaaccatgaacctctggcgggggaagacgacgatacgcttccggttcccgtctctttacaagagcgtgtaacaggcaacagcggcgttgatattttcgcctaacgtcagaggtagcaccgtaatccgcgtcttttccccgctttgttgcgctcaagacgcaggataattagccgataagcagtagcgacacaggaagaccgcaacacatgactgattacgcgataagcaagaaaagcaagcgatcgctttggatcccgattctggtattcattaccctcgcggcctgtgccagcgcaggttacagctactggcattcgcatcaggttgccgctgaagacaaagcgcagcaacgcgtcgtgccctccccggtcttctatgcgctggatacctttacggtcaatctgggcgatgcggatcgcgtgctttatatcggcataaccctgcgtctgaaagatgaagctacccgctcgcggctgagtgagtatttgccggaagtccgtagtcgcttgctgttactgttttcgcgtcaggatgctgccgtactggcgacagaagaaggcaagaaaaacctgattgccgagattaaaaccacactttccaccccgcttgttgccgggcaaccgaaacaggatgtcaccgacgtgctgtataccgcttttattctgcgataacgacatgggcgatagtattctttctcaagctgaaattgatgcgctgttgaatggtgacagcgaagtcaaagacgaaccgacagccagtgttagcggcgaaagtgacattcgtccgtacgatccgaatacccaacgacgggttgtgcgcgaacgtttgcaggcgctggaaatcattaatgagcgctttgcccgccattttcgtatggggctgttcaacctgctgcgccgtagcccggacattaccgtcggggccatccgcattcagccgtaccatgaatttgcccgcaacctgccggtgccgaccaacctgaatcttatccatctgaaaccgctgcgcggcacagggctggtggtgttctcaccgagtctggtgtttatcgccgtggataacctgtttggcggcgatggacgcttcccgaccaaagtggaaggtcgcgagtttacccataccgaacagcgcgtcatcaaccgcatgttaaagctggcgcttgaaggctatagcgacgcctggaaggcgattaatccgctggaagttgagtacgtgcgttcggaaatgcaggtgaaatttaccaatatcaccacctcgccgaacgacatcgtggttaacacgccgttccatgtggagattggcaacctgacaggcgaatttaatatctgcctgccattcagcatgatcgaaccgctacgggaattgttggttaaccctccgctggaaaactcgcgtaatgaagatcagaactggcgcgataacctggtgcgccaggtgcagcattcacagctggagttggtcgccaactttgccgatatctcgctacgcctgtcgcagattttaaaactgaaacccggcgacgtcctgccgatagaaaaacccgaccgcatcatcgcccatgttgacggcgtcccggtgctgaccagtcagtacggcacacttaacggtcaatatgcgttacggatagaacatttgattaacccgattttaaattctctgaacgaggaacagcccaaatgagtgacatgaataatccggccgatgacaacaacggcgcaatggacgatctgtgggctgaagcgttgagcgaacaaaaatcaaccagcggcaaaagcgctgccgacgcggtgttccagcaatttggcggtggtgatgtcagcggaacgttgcaggatatcgacctgattatggatattccggtcaagctgaccgtcgagctgggccgcacacggatgaccatcaaagagctgttgcgtctgacgcaaggatcagtcgtggcgctggacggtctggcgggcgaaccactggatattctgatcaacggttatttaatcgcccagggcgaggtggtggtggttgccgataaatatggcgtgcggatcaccgatatcattaccccgtccgagcggatgcgccgcctgagccgttagtgatgaataaccacgctactgtgcaatcttccgcgccggtttcttctgcgcctctgctgcaggtgagcggcgcactcatcgccattattgccctgatcctcgctgctgcctggctggtaaaacggctgggatttgccccgaaacgcactggcgttaacggtctgaaaattagcgccagtgcttcgctgggcgcgcgtgaacgggtcgtggtggtcgatgtggaagatgcacggctggtgctcggcgttaccgcagggcaaatcaatctgctgcataaacttcccccttctgcgccagcggaagatatgccaccggccgattttcagtctgtcatgaaaaacttgcttaagcgtagtgggagatcctgatgcgtcgtttgttgtctgtcgcacctgtccttctctggctggttacgcccctcgccttcgcgcaactgccgagtatcaccagccagccgctgcctggcggtggacaaagctggtcgctcccggtgcagacgctggtgttcatcacctcgttgacgtttattccggcaattttactgatgatgaccagtttcactcgcatcatcattgtttttggtttattgcgtaacgcgctgggaacgccctccgcgccacctaaccaggtattgctggggctggcactgtttttgaccttttttattatgtcgccggtgatcgacaaaatttatgtcgatgcgtaccagccattcagcgaagagaaaatctcaatgcaggaggcgctggaaaaaggggcacagccgctacgtgagtttatgctgcgtcagacccgcgaggcagatttagggttgtttgccagactggcgaataccggcccgttgcagggacctgaagccgtgccgatgcgcattttgctcccagcctacgtgaccagcgagttgaaaaccgcatttcagataggcttcacgattttcattccgtttttgattatcgacctggtgattgccagcgtgttgatggcattggggatgatgatggtcccccccgccaccattgctctgccctttaagctgatgctgtttgtactggtggatggctggcaattgctggtcggttcgctggcgcagagcttttacagctagagaggcaaaatgacacctgaatcggtcatgatgatggggactgaagcgatgaaagtcgcgctggcactggctgccccgctattgttggtagcgttggtcacgggccttatcatcagtattttgcaggccgccacgcagattaacgaaatgacgctgtcgtttattccgaaaatcatcgccgtatttatcgccattattattgccggaccgtggatgctcaatctgttgctggattacgtccgcaccttgttcactaacctgccgtatatcatcgggtagcccgtacaatgttgcaggtgacaagcgatcaatggctttcctggctaagtctgtacttctggccgttactgcgcgtgctggcgctcatttctaccgcgccaattctgagcgaacgcagcgtgccgaaacgggtaaaactgggtctggcaatgatgatcacgttcgccattgccccatcattacctgccaacgatatacctgttttttcgttctttgctctgtggctggccgtgcagcagatcctgatcggcattgcgcttggttttaccatgcaatttgcctttgccgctgtgcgaaccgctggcgaaattatcggtctgcaaatggggctgtcatttgcgacatttgtcgatccggccagccatcttaatatgcccgttttagcgcgtatcatggatatgctggcgttactgctgttcctgacatttaacggtcatttatggttgatttcactgctggtcgatacctttcacaccctgccgattggtggcgaaccgttgaacagcaatgcgtttctggcactcaccaaagcagggagtttgattttccttaacgggctgatgctggcgttaccgctcattactctgctgctgacactgaatctggcattaggtttacttaatcgtatggccccgcaattatccatttttgttattggatttccattaactctgactgtcggcatctctttaatggcggcattaatgccgttaattgcgcctttttgcgaacatttattcagtgagatgtttaatttgctggctgatattattagtgaattgccattaatataattccgtaacgtttatcatgttatcctaaggattatccgaaaaataatacctacgaacatcttccaggatactcctgcggcgaaatatttgttttaagctcactcacatatcgcaacatttactttactttaagacaattccaggcaaattatacaacactttacgggatagtaagtccgcctgaaaaatcgcgagagtggcgcattaggtgacccatgttgttccgtttagtcatgatgaaatattcaggtaaggggaattatcgttacgcattgagtgagggtatgccatgtcaacgattattatggatttatgtagttacacccgactaggtttaaccgggtatctgttgagtagaggggttaaaaaaagagaaatcaacgacattgaaaccgttgatgaccttgccatagcttgtgattcacagcgcccttcagtggtgtttattaatgaggactgtttcatccatgatgcttctaacagtcagcgcatcaagcacatcattaatcaacatcccaatacgttatttatcgtttttatggcaattgccaatgttcattttgatgaatatctattggtcagaaaaaatttattgatcagttctaaatcgattaaaccggaatctctcgacgatatccttggcgatattctgaaaaaagagacaacgataacctcttttttaaatatgccgacgttatcattgagccgaaccgaatcgagtatgttgcgaatgtggatggcaggtcagggaaccattcaaatctctgaccaaatgaatatcaaagccaagaccgtttcatcgcataaaggtaatattaaacgtaagatcaaaacgcataataaacaggttatctaccatgtcgtccgactgacggataatgtgactaatggtatttttgtcaacatgcgctaacacattctgactggtggtttcccaccagtcaggctgaataagattactctgctttctccacaaagataccgtcctgatgccctgcttcattaaagaaccagatgccgagcgggtagtcttccagcgaaaccaggtacattgtgccttcactaaactcctcaactgccagtaccacgccaggacgacgcggaccgccatccgttttgactgttacccgatcattcaccttcatcgttttcctcctgtggctttgtgccagtgtagaacaatttcgtttttctggcagcgccaggcgcgcgcgagtgctgattttctcgacggtctatacttaagagatgccaggcggacttaacgactggcggcaacaacagagtaacggttgcgaggaaagatgatgaaaaccgcaaaagagtacagcgataccgcaaaacgtgaggtcagcgtcgatgtcgatgccctgctggcggcaatcaatgaaattagcgaaagcgaagttcatcgcagccagaacgattctgaacacgttagcgtcgatggacgtgaatatcatacatggcgtgaattggcggatgccttcgaactggatattcatgacttcagcgtctctgaagtgaatcgttgaatgcacaataaaaaaatcccgaccctgagggggtcgggatgaaacttgcttaagcaagaagcacttaaaaaattcgttacaccaggaaatctgatgtgttcatcaccttatccgcaatttttttcgctgacaagaaaatattcgccatatgaatgattaacgctacttatgaatagaaatgtgacgcacgtcaccccttggtggctctggcgtcagcgggatcgctcccgaaaaaatcatctttgataatttgtgctgttttgagaatcatcctggtaaggggagtactgcgcgactatgttttcaattcaacaaccactactggtttttagcgatcttgatggcaccctgctggacagtcatagttatgactggcaaccggcagccccctggctcacccgtttacgcgaagcaaatgttcccgtcattctctgtagcagtaaaacatcagcggaaatgctgtacttgcaaaaaatgttggggctacaaggtttaccgctgattgcagagaatggcgcagtgatccagcttgctgaacaatggcaggagatagacggttttccacgcatcatctcaggtattagccatggcgaaatcagccaggttttaaatacgctacgcgagaaagaacattttaaattcacgacttttgatgatgtcgacgatgcaaccatcgccgaatggacgggattaagccgtagccaggcggcgctgacgcagcttcatgaggcgtcggtaacgctaatctggcgcgacagtgacgagcgtatggcacaatttaccgctcgtctgaacgaactgggcttgcagtttatgcagggtgcgcgcttctggcacgtactggatgcctctgccggaaaagatcaggctgccaactggattatcgcgacctatcaacaattgtcaggcaaacgcccaaccacacttggcctgggcgatgggccaaacgatgcgcccttactggaggtaatggattacgcggtgattgtgaaagggctaaaccgtgaaggggtgcatctgcatgatgaggatccggcccgcgtctggcgaacgcagcgtgaaggaccggaaggatggcgtgaagggctggaccattttttctccgcccgttaagcgttatcgctcgcgaatacccgattacgcccagcctgtttagcgagataaagccgacggtcggccagtgactggagttgttcaaaatcataatcaccggtttcctcgctgctacttacccccaacgaggcactgatgcgtatcgtcgtactcttagcaatcaacatctctttttcatttaacttcaggcgaatacgttctgcgacttccgcagcctccgtcagactcgcgcctggcagaatcacacaaaactcctcaccaccgacccgcccggcaacgtcctgcgcacgcaaggaactgctaattaatccggcagcatgagaaagaacacggtcgcccgcctgatgaccaaagcggtcattaatcgctttaaaatggtcaagatcgacctgaatgacagaaaaaggatgttggtgcgtctgacacaatttcgcgagcggacgggctttttcgaacagtgcgccacggttatataaacgcgttaaggtgtcgtgccacgcctgccactgcaacgagctttgcagaacatacatgttgctgaccatccggcgaatcacataccaggagatgagtaacatggtggtaaagagcgcccacagcagggttaatgcaatgctgatactaccgaaatcgccgcgcacgccttcgcttagcgtatggacgcgcaccagcacaccgtcgaaatggtccagacgttcccagctaacatagcgactgtccatacgaatgccgccccgcgtgtcatgttccattgcctgcgccagcaaggccagttcacgaggatcaaaaatattccctgttggatggtcaggattggaagaggtcaataatctcagcttactgtcatagagctgatactcaccatcgaggtttttatcgatggcgtttcttaaaaattgctgcatagtacgcacgggaatactcatccccagcacgccataccagtagttattactgtctaccggaacactgacggtaacctgcggttcagtattgctggcgtgtttcggttgcgaagtgaaccagcgtacagcgcggtgacgattttctcgttgtgaatggccgataaaccagggttgggtgacatagccgtaataacgcgtcgggacattgcgcgtaaacaaggtcggctgcgtcgaaacgtaaaatccggcacgcgagacatacatcgcctgttcaaccatcgacgaagagttgtgcgccagtcgcagcaagtaaccaacttccagtgcagcggtaatttcattgtcgaggctttcattttcgcgagacaggagattcccctcactgactaatgcatccgacacgccattgactggcagggtgcgccgtcggttgagttcgatttgccaggcgtgctcgtcgcgatgctgttcgaactcggttacagcatcacgcagagaggtgaaatccagtggcgctacgagagcttcgcgcatgccattacgcaaaaagatcagtttgtcgacgttatactgcaaatgcttatcgagcgcgttggctacgttttccagatgattacgctggctggagatataggcatcttccagcactaccacttcacgccaggtgagcaaggtggaaaaaagcaataccacgataaagcagagattaacgatatgaccaggccccaggcggcgtgcgagttttttcaaccagctctggttttccatttttgtctcgtgctgcaccctgacgactccccacctgcttttttatgattctggcataacctggcgatagcgtaccgcaaaacagcgataattttataatggtggcatgataagacgcgactatcattcattgcaggcattggcacaccaggccggatgtgatccggcctggtcttaatgataccctttcaaacttcctccgcagaacgactcccctcccccggaacaagctcggtttcatgaaaagcttcccgcttgaccccgtaaccgtcataccaacgacactcaaccataccgctggagtatccagtgacaatcatccgcgggccgccctctttaaccgtaacttcctcactaaccataaagctcatactcgcctccttttttcgagtgaaacttgttcaccttagttgaagatggcgaattttgcataatagcctgtgcgagttttaatgtgcctgaccgcgcattttctctacggctttcactcccagcaccacgatgccgccgatgataaatccaagaatcagatttaaaacagtcggtaatatcatcgccaccactgcactttgctgcccggcgaaatgttcaatggcgtgatgcagcggcgcaattccatgtaccacaatcccaccgccgacgaggaacatcgccagcgtgccgacaatcgataacgctttcatcagccagggcgcaatgatcaataaccctttacctaatgcctgcatcagcgcgctggatttttccgccagccaataccccaggtcatcaatcttaacgataacccctaccagaccgtagacgcccacggtcactaccagcgcgatgcctgaaagcaccagcacctgattaagcaacggcgcttcggccacaatccccagcgtgatggcgacgatttcggcagacaatataaaatcggtacgaatcgccccttttattttgtccttttcaaacttcagcggatcctgcgccgccagcttctccagacgctgctgactctgcgccggatcttctttatgtttacgcgcctccagcatatgcagcactttctctaccccttcaaagcagagaaacgcgccaccaatcatcaacagaggcgtaatcgcccacgggataaacgcactgatgatcagcgccagtggcaccagaatcactttattaatcagcgatcctttcgccacgccccagaccacgggaagttcccggttggcccgcacgcctgaaacttgttgcgcattgagcgataagtcatcccctaatacaccggcggttttcttcgccgccagtttgcccatcacggagatatcgtccagtagtgtggcgatatcatcgagcaacgtcagtaaactactcccggccaaaagcattccctctcatttttattgttgaagggtgtaagtatgaagcaaaaacggcagctctgatacttacttcacaggtcaacatttttttaacaatcaagtgcaattatatctctcgccagcagaatgattttcacgtttactatgaaccacctttttatttccaccgtgagggattatgcgtttccgccagttgttaccgctttttggcgcgctgtttgcgttgtatatcatttggggctcaacctattttgtcattcggattggcgtggaaagctggcctccgttaatgatggcgggcgttcgattcctggcagccggtattttattgctggcatttttgctactgcgcggacacaaactccccccgctacgtccgctgctcaatgccgcgctgattggcctgttattgctggctgtcggtaatggcatggtgacggttgccgagcatcaaaatgttccttccggcatcgccgccgttgtggttgcaaccgtgcccctctttaccctgtgcttcagccgcctgtttggcattaaaacgcgcaaactggaatgggtgggtatcgccattgggcttgccggaatcatcatgctcaatagcggtggaaatttaagcggcaatccgtggggcgcgattctgattttaatcggctcgattagctgggcgtttggctcggtttatggctcgcgcattaccttacctgtagggatgatggcgggtgcgattgagatgctggcggcaggcgtggtgttaatgatcgcgtcgatgattgcaggtgaaaaactgacggcgctcccttccctttcaggcttccttgcggtcggctatctggcgctgtttggttcgattatcgccattaacgcttatatgtatttaatccgcaacgtcagtccggctctcgccaccagctacgcctacgttaacccggtggtcgcggtcttgctgggtacgggactgggtggagaaacgctgtcgaagattgaatggctggcgctcggcgtgattgtcttcgcggtggtactggtcacgttgggaaaatatctctttccggcaaaacccgtagttgcgccagttattcaggacgcatcaagcgagtaaatgaatcccctgcgtgtcgatctgcgcgctggcaccttcgccgcagatccactcttccagacgctcgctaagcgcttcatccgtcagcttctcgcgcccacgtaacgcgcactcccagacaatcaatacgcgccagccgagttcctgcaagcgactgatatcgcggcgatcgcgctcaacatttttacctatcttctccagccagaactcggttcgagtcgcaggcactttaaacagatagcagtgatgatggtgccagaagcagccgtgggtaaatatcacgcaacgatattcatcaacgacaaaatccgggcgaccgggcagactggcgtcctgaacgcgaaacgccagtccctgcccggttaacagactggcgaggcgcttctcaatcgccgtatcacgcgtggcaatcgcgcgcatatttttgctgcgagtggccttatcgtgaacgtcggccatgttgtgcctcttgctgacgcaacgccaccgcctgtttgatttttggctcaagcagttttgccaccgcggcaaagaccggcacgaccaccgagttaccgaactggcgataggcctgagtgtccgaaaccggaatgcggaatttcgcttctcccggcgcttcaaaacccattaagcgcgcgcattcccgaggcgttaaccgacgtggacgatgttgctgattcagcggatcgtcaaaatctttctcacccgtggccatatcccagccgcgatcgatcaaaatttccgcgccatctttgtaataacgcgcagacaacgtacgcgtgacgctttgcggattgttcggataaaccattccataaccaaagccattaccgcgtgcctgatgttttttcgcataacgatagaggtacttccacagcaccggcgtcaggatatatttcgcctcgaccatcgggtccagcagctgggccagcgtcactcgctgcgcagggaaacattcgctgatatcacgcagagtaaaatcggctttcagattcagatcgcgacgaaaacccaccagcacgatgcgttcacggtgctgcggcaggaaatgtttgccatcgatgattttcggatcgtccggcccgttatcttcagcgtcggcaacgtcatagcccagttcgtcaagcgtctgcatgatgatgcggaacgttttaccctggtcgtggcttttcaggtttttgacattttcgagcacaaaaatcgccggtcgacgcgcgtcgataatacgcaccacatcaaagaacagcgtgccctgggtatcacaggcaaaaccgtgcgcccgcccgagcgagttctttttcgatacgccagccagcgaaaatggctgacaaggaaaaccggccagtaatacatcgtgttcaggaatgtgttgacgaatatgttccgctgccgcctcatcactcacgccgtctttatggctgagggtgatgtcgcggatatcttcattaaaatgatgcgtcgccggatcgcaataatggttggctttataagtgcgaaccgcatgtttgttccattcgctggtaaagacgcactgtccgccaatcgattcaaaaccgcgacggatgccgccaattccggcaaatagatcgataaagcgaaacgcataatgcggatgatgtgccggaggtttgggtaacaacgtttgcagatgggcgaactccttctcacttaaacggtgccatgccgagtcattcgccagcgcacgttttaaaattgccgcgctccagtgattctcacccacaccattaagctgcgccaccagcgttttaacatcataaatttgcagcagtttctccagcattgcctgtgcggcattcccggtgctgtatgaatcggttactgatatattttcctgcatagatttaaccggccatctgagatggccgacaggttaacataattacagccatttagggccacgcgctcagcccgcgggtgaaaacgcatctatcaccttgtgatcgacaccttcattctcccccgccagttcggcactgagcttcgccataaactcgactaaaaattgcgcgttgtgctgcgccagctgcttgcctcttgcggtttgcatggtttgcggtagcttcagcaacttagtctggaaatgatccagcgcgtagcgtttatcatccagcgggcgatgctgtgcgaacggatcttcgccatcaaacagcgccacgcccaatgcccctgaaacagcaaagacgcgcgccaggccaatcgcccccagggcttccagccgatccgcatcctggacgattttagcttccgttgttaagggggcgatttgcgcgctgaaactgtgagcggcaatggcatgacaaacggcctcgattttctccgccggaaattgcacgaactcttcacggagcaggcgacgcgtctcttctgccgccaggattgaagaacgctgccgttgtggatgatttttcgccaggctcacaatatcgtgaaaataacaggcggttaaaatcaccagcatatcgacatcgtcatctgccgccagcttctgtgccgtagcccagacgcggcgaaaatgacacacgtcatgggccgcgtcctggtgctggtgatggtttttcaaccagttttcgaactgtgcctgccagtgttgtacgtccatacgcgctccgttgccaaagagtcgcaaccttagcagtttttattcatagcgtctgctacgtgcgggacgaggtcgggtgtaccaggcaatgctgcctaacaatgccccgaccagagccataaataaaaagccaaccagtgcccctaaccactttcccgcggtagagcctaaatcgctttcaaatcccgacacaggggcatcggggatccggctcatcacccagatgtaacgcgccattgcccagacaaaatagccacaccatgtatagaaagcccacaaagccagtttgccaccaggactgcgagagagtctctcttccatctttgtcgaaccgtattccattttgagataacccggaaaattcagacttagtactattatgtgataaaagtcacattttttcacattggatgagccagtcaagactcaatcattttttgaacaaatagataatttttgcgcaatggcaataattaccggaaaaacagcaataaagatttattattatctatggtaatggttttattaattcacctaaacaatatattagcaccgaattcaattataccttttttgatttctgtgtcatgataaccccgttattagccttttatcgtcttgtttatattttttgggccggcatgatgccggcttttttttatgccttcattaatatgcgcgtgatcacaccagccgtttagcgcaacactcattgatactccctatctttccgattaactcataacatattgatatatatttataaatctcatgaatgcttatatctagaattcataattctgaattatattaaatagattggaaacattttgaaatcttttaaatacatttgttacatgtaatccttaaaataaaatgaacttcatagaatagtatccaaatgtgcttttttggataacggcacttattgatatattcatgaagattataatcacaagggaatacataatgaaaagaaaagttctggcaatgctggtcccggcgttattagttgctggcgcagcaaatgcggctgaagtctataataaagatggtaataaactggatttgtacggaaaagtagcgggcctgcactacttctctgatgatgctggcagcgatggcgacatgtcatatgcccgtatcggtttcaaaggtgaaactcagatcgctgaccaattcactggttatggtcagtgggaatttaacattggcgcaaacggtcctgaaagcgacaaaggtaataccgcaacgcgtctggcatttgcaggtttaggctttggtcagaatggtactttcgactatggtcgtaactacggtgtcgtatatgacatcgaagcatggaccgatatgctgccagaatttggtggcgatacctatgctggtgccgacaacttcatgaacggtcgtgctaacagcgtagcaacctatcgtaacaatggtttctttggtcaagttgatggtctgaactttgcactccagtatcaaggtaacaacgagaaaagcggattatttgatcaagaaggttcaggtaacgggaatggccgtaaacttgctaaagagaacggcgacggttacggtatgtccacttcctatgactttgactttggtttaagtctgggtgctgcatattctaattctgaccgtactgacaatcaggttcacaaaggtttgtataacactcgttatggagatcgcttcgatgcaactgctggcggtgaaacagcagaagcatggaccgttggtgctaaatacgacgctaataacgtttacttagcagctatgtatgctgaaacccgtaacatgactggttacggtgatgctgatgccatcgctaacaaaacccaaaactttgaagttgttgctcagtatcagttcgacttcggtctgcgcccgtccatcgcttacctgcaatctaaagggaaggatttaggcggattgaatggtgataactttgatagccagggtaatcatcactacgcaaacaaagatctggttaaatacgttgaagtcggtgcgacctattactttaacaaaaacatgtccacctacgttgattacaaaatcaacctgctggacaacgacgacgacttctacaaagaaaacggtatcgctaccgatgatatcgttgctgtgggcttagtctaccagttctaatcagccaacgcgccgcggcgtgttactgtaaaactaaacactagcctgagttcgtccctcatcgaactcaggcttttttattggcatttcatctccatctgcggcacacgcaattgccaaagcatatcgatacagcacattaccccgcccctcctggctcaataaaatctaccagcgtctcttccagccaacacccaaatgcatttctttatgaattaatccgcaacaaaaccgccgtccatatagaaatatttgcaaaaatagtgcatgaaaaaagctttttctctgccaatccgggatataaatattcatcagcaccacaatattccacagcactaaatctctccccgccgccccggatctctgataatggtctaaaatcattgaggccacttgcgacggcgttgctcaataaggaaaagttggcgtgaataatattcaacaccagtgcagcatcatcattacatacttacgcccgccgactaccgctttcgatatattgactcaattttccagcctgggtaaaaataacgaccagctcagtcgcaaatatagtgactaccctaactaagcaacaataaggaatacactatgactgttcaaacaagtaaaaacccgcaggtcgatattgctgaagataatgcattcttcccttcagaatattcgcttagccaatatacgagtcccgtctctgatcttgatggcgtggactatccaaaaccgtatcgcgggaaacataaaattctggtgatcgccgcggacgaacgttatttgccgaccgataacggaaaactgttctcgaccggtaaccatccgattgaaacgttgctgccgttgtatcatctccatgctgcaggtttcgaattcgaagtggcgaccatttccggtctgatgaccaagtttgaatactgggctatgccacacaaagatgaaaaagtaatgccattctttgagcagcataaatcgttgttccgcaatccgaagaaactcgcggatgttgtcgccagcctcaacgctgacagcgaatatgcagcaatctttgttcctggtggtcatggcgcacttattggtttaccagaaagccaggacgtggctgccgctttacagtgggcaatcaaaaatgaccgttttgttatctccctttgccacggcccggcggcatttctggcgcttcgccacggcgataacccactgaatggttattccatttgcgcattcccagacgccgcagacaaacaaacgccagatattggctatatgccgggtcatctcacctggtacttcggcgaagagctgaagaaaatgggcatgagcattattaatgacgacatcaccgggcgagtacataaggaccgtaaagttctcaccggcgacagtcctttcgcagcgaatgcgttgggtaaactggcggcgcaggaaatgctggcagcttacgcgggttaatccctgttacgtttgaatgtaagcgcataatcaatcgcagctgcgttagtacttacgacgtggctgcgttttttcacggttaatttatggcgtactgaagccctatgttaatttctttgcggtaacgtaattcggaacacgttatgcttattgagatagtgatacgtagcacttcctccatgtaattcggcaatcgctttgactaaagaaagaccaagtccctgacctacggaatgacgcgaattatctccccgccaaaatctacggaagagtttttcaggctcattaattttcgttccagggctggcgatatcaatattaagatagccgttggtatcaagaaaactggttatatgaatgcgcgatttttctggtgaatatcgaatggcgttaacaataagattcgataacattcgttgcagtaaaattttatccgcaaagatttgctgattgcactcgaccttaaagcaaatctctttctcgtctgaaaggtattcaagatagtccaacaaattttcgacttccttattgagagaaagcgaatccagtttcaccaaaacattgtttttatctgccctggcaagaaacagtatattctctgttaaccgcgaaatattttccagctcttcaatgtttccggcaattgttttttgatattcagcgatacttctggtttgactgagcgtaacctgattctgacccagtaatgcattaattggcgttctaagttcatgagcgagatcgtcagcaaattgacttaggcgttcaaaatctttgactaaggcttggtgcattttattcaacgcctgcccaagaggttttagttctctcggtaatgcgctaacctcaacaggctctcggctatcgttataattcagcgcttccgttacaccactcaactttttgatctctcgtaaccccgttctgattaacaacggacttaatactgagcacagtataatggcgacaatgcaaattataatgctattaattttatactgttcaagcatgttatgtctggctgaagccaatttagccacagtaaccgttaatgatggcgaaacttcatcaatattaattcgtaaagcatctatctctgtgtcattaataatgcttctgtaaatgccagctgcgctgattgtctcagtagcaggtatgttatttaacatgtcatcactgacattcgtccggttaacaattttgttgatgctatcaccatgaatgatcaagatatcctgactaacatccatcatccggttaaagtacacaggtaacgtatctagatttaccccatcaattaacaactgcttgatctgcgctgtccggttaatgagtgttgtatcatcgcgccatttcaactcacttgccaggccattatagagagtccatacaattccagcgccagcaacagacagcagcaatataaaaagcaaggttaaacggacggttatagataatcttttcattatttttttaccgctacgaatgaatagcccatcccccggattgtggcgattagcttttcaggaaaaggatcatcaacttttgcgcggagcctgcgaatggcgacatccaccgtattggtatcactatcaaagttgattccccaaatttcactcgcaataaccgttctgggtataatttcgccagctctggaggccagtagccaaagtaactgaaactccttgcgcgtcagtgtaatattgatattgtccctgctcacactttgactaacagagtccattcttaagccgctgatttctagtgttgaattcaaagcgtgatgttgccttaattgtgcccgaacccttgccagcaactcagaaaatgaaaaaggttttaccagataatcatttgccccactgtccagccctctgactctgtcatcgacagaatctcttgcagtaaggcaaataacaggagtttgctttgccgttcttaacgtttgtaagatctgccagccatccatacccggaagcataatatccagaatgatcaatgcataatcatccttcagcgcaagataaagcccatctctgccatcagtaacggcatcaatgacataacccgcttcggaaagcccctgcgttacccattcctgggtcctttgattatcttcaataagtagaatcttcatgaaaataatatgccataaatcatatgttatagaaacagcctggttcattacaaaattgtaatgcttctgtaaggttaccctggacgttttttcgctatcctcaaaactcattcacatgacaaggatataaacatgttaaagcgttatttagtactctccgtagtaacggctgcattttcattaccttctttggtctatgctgcacaacaaaacattcttagcgtgcatattttgaaccagcaaacaggaaaacccgctgccgacgtgacagtcactcttgaaaagaaagcggacaacggctggttacaacttaataccgccaaaacagataaggatggacgaattaaggcactgtggcccgagcaaactgcgactactggcgattaccgtgtcgtatttaaaaccggggactatttcaagaaacaaaatcttgaaagtttcttccctgagatccccgttgaatttcatatcaataaagtgaacgagcattatcatgtgcctttattactcagccaatatgggtattcaacctatcgtggcagttaatgcataaatatataaaagcagatctctgctactgttagggaggtgactccctgacagattaacagtaaacggctcttgctggctaacgacaaaaaagtgtgatggcttatgaaaaagaatcaatttttaaaagaatcagatgttacggccgagtcggtattctttatgaagcgtcggcaggtgttaaaagcactgggcatcagcgcagctgcactttctttgcctcacgctgcgcatgccgatctgcttagctggtttaaagggaacgatcgtccgcctgcccccgccggaaaagcgctggagttcagcaagcctgccgcctggcaaaataacctgccactgacgccagcagataaagtctccggttataacaacttctatgaattcgggctggataaagccgatcccgccgctaatgctggtagcctgaaaaccgatccatggacactgaaaatcagcggcgaagtggcaaaaccattgaccctcgatcacgatgatttaacccgtcgcttcccgctggaagagcgtatttatcgtatgcgctgcgtggaagcgtggtcgatggtggtgccgtggattggttttccactgcacaaattgctggcgcttgccgaacccaccagcaatgcgaagtatgtcgctttcgaaacaatttatgcaccggaacagatgccaggccagcaggaccgctttatcggcggcgggctgaaatatccttatgtcgaaggattgcgtctcgacgaagcaatgcatccgctcacactgatgaccgtaggtgtttatggcaaggcgttaccgccacaaaatggcgcgccagtgcgactgattgtgccgtggaaatatggctttaaagggattaaatcgatcgtcagtattaagctgacccgcgagcgtccgccaaccacctggaatctggcagcgcctgacgaatacggtttttacgccaacgttaatccgcatgttgatcacccgcgctggtcacaggctaccgaacgatttatcggttcaggcggcatcctcgatgtacagcgccagccaacgctactgtttaatggttacgccgggcaggtggcatcgctgtatcgtggcctggatttgcgggagaatttctaaatgcgtctgacagcaaaacaggtgacatggctgaaagtttgcctgcatcttgccggattgttgccgtttctctggctggtctgggcgatcaatcacggtggactgggtgccgatccagtgaaagatattcagcattttaccggtcgcaatgcactgaaatttttgctggcgaccttgttaatcacacctctggcacgctacgcaaaacagccgttattgatacgcactcgccgcctgttaggcttatggtgctttgcctgggcgacactgcatttaaccagttacgcattgctggagctgggcgtgaataatctggcgttattaggtaaggagttaattacccggccttatttaacgttaggaattatcagctgggttattttgcttgctttagcgtttacttcaacccaggcgatgcagcgaaaactcggcaagcactggcaacagttgcataatttcgtctatcttgtcgcgatcctggccccaatacattatctgtggtcagtgaagattatttcaccgcagccgctcatctacgctgggctggcggtactgcttttagccttacggtataagaagttgctttcctttttcaaccggttacgcaagcaggttcacaacaaattatctctataacttcatattgccgacaaagtacgcgttatccctgccggatgcggcgcgagcgccttatccggcccacacagatcgcatcaggttatgtttcgtttgtcatcaacctcaaatcatcgacataatttattttatttcaataagataggtaaatacacctgagaaaactatgctctcgttttctaagagttattgcatttcgccatatgttacaatataacataacacatcatgtacaataactctggaggaaactgttttggcgattcgtcttcataaactggctgttgctttaggcgtctttattgttagcgctcctgccttttcgcatggtcatcactcacacggcaaacctttaacagagatcgaacaaaaagctgctaatggtgtttttgatgatgccaatgtacaaaatcgaacgctcagtgactgggatggagtctggcaatccgtttatcctttactgcaaagtggcaaacttgatcccgtctttcagaagaaagcggatgcagataaaactaaaacatttgctgaaattaaagattattatcacaaaggttatgcgacagatatcgagatgattggcattgaggacggcattgttgaattccatagaaataatgaaacaacatcctgtaaatatgattacgagggatacaaaatactcacctataaatcaggcaagaaaggcgttcgttacttattcgaatgtaaagatcctgaaagcaaagcccctaaatatattcaatttagcgatcatataattgcaccacgaaaatcatctcattttcacatttttatgggtaatgattcacagcaatctttattgaatgaaatggaaaactggccaacgtattatccctatcagttgagtagcgaagaagtggtcgaggagatgatgtctcattgatttttttgcgctgacttcaattatttaacagaacagtgcctggtagtaacgacaataatttaccaagacaaataaataaaacaaactcagacacgctcatgcttgagacgtgtcttttttattatgtctgtagaaaaaaaccgagaaagcggcgaacaataaatacacaactcaccaatacagactggcagcgccaatgtctccaggagcaagtcatctgtcatggtaaagctaaccagaaatataggttaattttggtatttaaaccttttttacttgttagtatgatacaaaggctttcaaaaaagctgggaaattcaacaactcttggaaattatggactttgtcccgcggctttaatctgacggccgcgttccttttttggctcaattattgaccccttctctacgcaacttcagttcccaccaccaactttgcggcagcttcgtaggatcaatgtctaaaagaataatggtgaccgataagaaaacgactgaataactgcagattttcgctcgaaaccttcctgtcagatccatagcgaatcaagtgctgaatgtcacagtatcgaacagaaaacagtgacgatctaacccttcaagaatattctacgattgttctgtttaggaaaagcaaggcggtaagtcgggagataagtcattgataaagtggcggagagagggggatttgaacccccggtagagttgcccctactccggttttcgagaccggtccgttcagccgctccggcatctctccgttcagatggttgccatgatgccaggaaatttggcattttaacagtccctgtccgtgcaattttgttcaagtgacgagtttgcgagcaaaacgatgattaagtggccctggaaagtacaagaatcagcacatcaaactgcccttccctggcaggaagcactatcgatcccccttttaacgtgtctgacggaacaggaacaaagcaaattagtcactcttgccgaacgttttttacagcaaaagcggcttgttcctttacagggctttgaactggattcattaagaagctgccggatagcacttctattttgcctgcccgttctggagttaggactggaatggctggatggttttcatgaagtcttaatttatcctgcgccatttgtggtcgatgacgaatgggaagacgatatcggtctggtgcataaccaacgtattgttcagtcaggtcagagctggcagcaagggcctatcgttttgaactggttggatatacaagattcttttgatgcttctggttttaacctgattattcatgaagtcgctcataagctggacacccgtaacggcgatcgcgccagcggagttccctttattccgttgcgtgaggttgctggctgggaacacgatcttcatgctgcaatgaacaacattcaggaagaaatcgaattagttggcgagaatgcggcgagcatcgatgcttatgctgccagtgatcctgctgagtgttttgccgtactttctgaatatttctttagcgccccagaactttttgctcctcgtttcccttcattgtggcaacgtttctgccaattttatcaacaagatcctttgcagagactgcatcacgctaatgatacagactcgttttcggcgacgaatgttcattaattaacaactttgcggattaattaaccaattgaaatgacttatgaaatttagtgttgacagacaaggtaccgctaagtaatatgcgccccgttctcacgattcctctgtagttcagtcggtagaacggcggactgttaatccgtatgtcactggttcgagtccagtcagaggagccaaattctaaaaattcgctttttagcgcaatgtcactgaccttagttgagcattgctttttaacggatagcgggtttttgacatcttaagcgccctcgacctttatggttgagggcgttttgctatgaacgccatcaccattttcccctcgattacaaaacttgagtaattcagtagtctcccctcttgcaactcacacccaaaactgcttaacgaaaagttattaattttcaatcatattgctatcaggatttacattttttcgctgtgctagaaagggcgcatttatgttagctcgttcagggaaggtaagcatggctacgaagaagagaagtggagaagaaataaatgaccaacaaatcttatgcgggatgggtattaaactacgccgcttaactgcgggtatctgtctggtaactcaacttgtgttccctatgactgcggcagcacaaggtgtggtaaacgccgcaacccaacaaccagttcctgcacaaatcgccattgcaaataccaatacggtgccctacacccttggagcgctcgaatcggcccaaagcgttgccgaacgtttcggtatttcgttggctgagttacgcaaactcaaccagtttcgtacgtttgctcgaggttttgataatgtccgccagggtgatgaactggatgtcccggcacaagttagtgaaaaaaaattaaccccgccgccgggtaatagcagtgacaaccttgagcaacagatagccagtacttcacagcaaatcgggtctctgctcgccgaagatatgaacagcgagcaagcggccaatatggcgcgtggatgggcctcttctcaggcatctggcgcaatgacagactggttaagccgcttcggtaccgcaagaatcacgctgggcgtggatgaagattttagcctgaagaattcccagttcgattttctccatccatggtatgaaacgcctgataatctctttttcagccagcatactctccaccgtactgacgagcgtacgcagattaacaacggcttgggttggcgtcatttcactcccacatggatgtcgggcatcaacttctttttcgaccacgatcttagccgttaccactcccgcgccggcattggcgcggagtactggcgcgattatcttaaattaagcagtaacggctatttgcgactgaccaactggcgcagcgcacctgaactggacaacgattatgaagctcgcccggccaatggatgggatgtacgcgcagaaggctggctacccgcctggccgcatcttggcggtaaactggtctatgaacagtattatggcgatgaagtggccctgttcgataaagacgatcggcaaagtaatcctcatgccataaccgcaggacttaactatacccccttcccgctgatgaccttcagcgcggagcaacgccagggtaaacagggcgaaaatgacacccgttttgccgtcgattttacctggcaacctggcagcgcaatgcagaaacagcttgacccgaacgaagtcgctgcacggcgtagccttgcaggcagccgttatgatctggtggatcgcaacaacaacatcgttctggaatatcgcaaaaaagaactggttcgcctgaccctgacagaccccgtgacagggaagtcaggagaagtgaaatcattggtttcgtcgctacaaaccaaatatgccctgaaaggctataacgtcgaagccaccgctctggaagctgccggtggtaaagtggtcacaacgggtaaagatattctggttaccctgccggcttaccgattcaccagtacgccagaaaccgataacacctggccgattgaagttaccgctgaagacgtcaaaggcaatttgtcgaatcgtgaacaaagcatggtggtcgttcaggcacctacgctaagccagaaagattcctcggtatcgttaagtacccaaacattgaacgcggattcccattcaaccgccacactgacttttattgcgcatgatgcagcaggtaatcctgttatcgggctggtgctctcgacgcgtcacgaaggtgttcaggacatcaccctttctgactggaaagataatggtgacggaagctatacccaagtcctgaccacaggaacgatgtctggcacgctaacgctgatgccacagctgaacggtgtagatgcagctaaagcccccgccgtggtgaatatcatttctgtttcgtcatcgcgaactcactcgtcaattaagattgataaggaccgttatctctccggcaatcctatcgaggtgacggtagaactgagagatgaaaatgacaaacctgttaaggagcaaaaacagcaactgaatactgcagtcagcatcgacaacgtgaaaccaggagtcactacagactggaaagaaaccgcagatggcatctataaggcgacctataccgcctataccaaaggcagtggacttactgcgaagctgttaatgcaaaactggaatgaagatttgcataccgctggatttatcatcgacgccaacccgcagtcagcgaaaattgcgacattatctgccagcaataatggtgtgctcgccaatgagaatgcagcaaataccgtctcggtcaatgtcgctgatgaaggaagcaacccaatcaatgatcataccgtcacgtttgcggtattaagcggatcggcaacttccttcaataatcaaaacaccgcaaaaacggatgttaatggtctggcgacttttgatctgaaaagtagtaagcaggaagacaacacggttgaagtcacccttgaaaatggcgtgaaacaaacgttaatcgtcagttttgtcggtgactcaagtaccgcacaggttgatctgcagaagtcgaaaaatgaagtggtcgctgacggcaatgactgcgccaccatgaccgcgacagtccgggatgcaaaaggcaacctgctcaatgacgtcaaggtcaccttcaatgttaattcagcagaggcgaaactgagccaaaccgaagtgaatagccacgacgggatcgccacagccacgctgaccagtttgaaaaatggtgattatacggttacggcctctgtgagctctggttcccaggctaatcaacaggtgaattttatcggtgatcaaagtactgctgccctgaccctccgtgtgccctcaggcgagatcaccgtcaccgacacagcgcctcaacagctgacggcaaccttgcaggataaaaatggcaacccactaaaagataaagaaatcactttctctgtgccaaacgacgtcgcaagtcagttctcgattagcaacagcggaaaaggcatgacggatagcaacgggattgccatcgcctccctgaccggcacgttagcgggcacgcatatgatcacggctcgtctggctaacagcaatgtcagcgatgctcagccaatggcgtttgtggcggataaagacagagcggttgtcgttctgcaaacatcgaaagcggaaatcattgggaatggcgtggatgagacgacgctgacagcaacagtaaaagatccttttgataacgtggttaaaaatctgtcagtagccttcagcacctcccccgcagacacacaactgagcctgaacgcgcgtaatactaatgagaacggtattgctgaagttacccttaagggcacggttttgggtgttcatacagccgaagccacactgcctaacggcaacaacgatacgaagatagtcaatattgcgcccgatgccagcaacgcgcaggtcacgctgaacatccctgctcaacaggtggtgacgaataacagcgacagcgtgcagctgacggcgacggtgaaagatccgtcgaatcatccggtggcgggaatagcggtgaacttcaccatgccacagggcgttgcggcaaactttaccctcgaaaataacggtattgccatcactcaggccaatggggaagcgcatgtcaccctcaaaggcaaaaaagcgggcacgcatacggttaccgcaacgctgagtaataacaataccagtgattcgcagccggtaacgtttgtggcggacaaaacctcggctcaggttgtcctgcagatgtcaaaagatgagatcacaggtaatggcgtcgataacgcaacgctaactgcaacggttaaagatcagttcgacaatgaggtgaacaatcttccggtaacattcagctcagcctcttcaggactcaccctgaccccgggagtgagtaataccaatgagtctggcatcgcgcaggccactctcgcaggcgttgcctttggtgagcagacggtcactgcatcactggctaataatggtgccagcgacaacaaaactgtgcattttattggcgacacagcggcggcaaaaattatcgagttgacgcctgtcccagacagcataatcgccggtaccccgcagaacagcaccggcagcgtcatcacggccacagtcgttgataataatggctttccggtgaaaggtgtgactgtgagctttaccagcagaacaaaatctgccgaaatgacgaacggcggccaagccgtgacgaacgaacagggtaaagctaccgttacttataccaatacccgttcctcgagagaaacaggagcgagaccggataccattgaagctagcctggaaaatggtagctccacgcttagcacgtccatacaagtcgacgctgatgcgtctacggcacatctcacctcgctatatacactttatgacacacaattggcaggcgacgataccactctctacattacggtgaatgataattacggcaatggtgtacccctgcatcaggtaaccctcagcgtttcgccgagtgaaggcgtgaccctcagtaataacggtataaatactaccaaccacgacggctatttatacgcaagcatgaccgctacaaaagccggggtttatcaagtgacggcaaccctcgacaatggcgattcgatgcaacaaacagtgacctatgtgccgaacgtcgcgaatgctgaaatcacgctggcagcctcgaaggatccggtgattgccgacaataacgatctcacgacactaacagcaacagtcgctgatacagagggcaatgcgatagccaacactggggtaacatttactctgccggaagatgtgagggcgaacttcacgctgagcgatggcggtaaagcgattactgatactgaaggcaaagcgaaagtcacgctgaaaggtacaaaagcaggcgctcatactgttacagcatcgatggctggcagtaagagcggacaactgatggtgaactttactgcggatacgctcactgcgcaggttaatcttaacgttaccgaggacaatttcatcgccaataacattgggatgaccaaacttcaggcaacagtgactgatggaaacggcaacccattcgccaatgaggcggtgacattcacgctaccggcagatgtgagcgcaagcttcactctcggacaaggcggttccgccattactgatatcaacggcaaggctgaagttactctgagcggtaccaaatccggtacctatcccgtgacagttagcgtgatcaattatggtgtcagtgatacgaaacaggtgacgttgattggcgatccgggtaccgctcaactgacctccttaacctctgtatactcattcgtcgtcagcacgaccgagggcgcaaccatgacggtaagcgtcactgacgctaacggcaacccggtagaaggcataaaagttaatttccgcggaacctccgtcacgctaagcagcaccagcgttgaaacggatagtcagggattcgctgaaattcttgtgacaagcaccgaggtcggactgaaaacagtttcagcctctctggcagataaacctactgaagtcatctcgcgattactgaatgccagtgcagatgttaattctgcgacgattaccagtctggagatacctgaaggtcaggtaatggtcgcacaagacgtagcagttaaagctcacgttaacgaccagtttggcaacccggttgcgcatcaacccgtgacattcagtgcagagccatcctcgcaaatgatcatcagccagaatacggtctctactaatacgcagggtgtagccgaggtcaccatgacgcccgaaagaaacggttcgtatatggtgaaagcatccctggcgaatggagcctcaattgagaaacaactggaggctattgatgaaaaactgacactcacggcgtccagcccgcttatcggtgtcaattccccaacaggtgcaactctgacggcaacgctaacttctgcaaatggcacgccagtggagggtcaggtcatcaactttagcgtaacgccagaaggtgcaacgttaagtggcggaaaagtgagaaccaactcttcaggtcaggcaccagtcgttctgaccagcaataaagtcggtacatatacggtgactgcatcgttccataacggcgtaacaatacagacacagacaaccgtgaaagtcactggcaactcaagcaccgcacatgttgctagctttatcgctgatccatcgactatcgccgccaccaacactgatttaagtaccttaaaggcaacggttgaggatggcagtggtaacctgatcgaaggtctaactgtgtacttcgccttaaaaagcggctctgccacattaacgtcattaacagcggtgaccgatcaaaacggaatcgcgacaacaagcgtgaaaggagcgatgacaggtagcgtcacggtaagcgcagtcacgaccgctggtggaatgcaaacagtagatataacgctggtggctggcccggcagacacctcgcagtccgtccttaagagcaatcggtcatcactgaaaggggactataccgatagtgctgaattacgtcttgttctgcacgatatatcaggcaatccgatcaaagtttctgaagggatggaatttgtgcaatcaggtactaacgtgccctatataaaaattagcgcaattgattacagtctaaatatcaacggtgattacaaagccactgttacaggcggcggagagggtatcgcaacgctgatccctgtattgaatggtgttcatcaagctggtctgagtaccacaatacaattcactcgcgcagaagacaaaataatgagcggtacagtatcagtcaatggtactgacctaccgacaactacattcccttcgcaggggttcactggggcgtattatcagttgaataatgacaactttgccccaggaaaaacggcggctgattatgagttttcaagctctgcctcctgggtcgatgttgatgctaccggtaaagtgacatttaaaaatgtcggcagcaattgggaaaggattacggcgacgccaaaatcaggaggccctagctatgtatacgaaatccgtgtgaagagttggtgggtgaacgccggcgatgctttcatgatatacagccttgctgaaaatttttgcagtagcaatggctacacacttccccgtgcagaccatttaaaccatagtcgttcccgaggcatcgggtcactgtacagtgaatggggagatatggggcattacacgactgaagctggttttcaatcaaatatgtattggtcatctagtcccgcaaactcaagcgaacaatacgtagtttccctggcaacaggtgatcaaagcgtatttgaaaagcttgggtttgcttatgcgacatgttataaaaacctctgattttccgctataatttcttaaagagtgctccattcggggcactcttttttacattcccactatagagcttgccctctctcaaagaaaatgaataaataacaatacggcaccacctgaatcgcgttcggtgtgactatgatcgtatttggtgagtattgctttgatccaaaggctggctttctgtgatgattgaccagcctcagagtattgatgacaccaccgttcataacagttcggtactactatgcataagtactgcctcatattctcgacaaaacactttttaatgcctttgcgaattcatccagacttatattgtcaattttttgtccaacgacgactgactccgagacatcggccattgcgggccatcgcgttttgtaatcagcataaattgcaacaacgggggtattataggcacttgccatatgtaatattgaggtgtcaggagttattgcgatataagcatcttttatgattgctgccgaacgtttaatcgaggatgataaggataaacggaagacattattataacaatccactaataccctggctttatcttcccctttgggtccatgaacgatcactattggcatatctgtttcactttgaatttttgctattagattttctgcaatcgataatgaaaatgtacgctcctgcgagctaccttctaaattaagcgcaatgtaagatcctaacgatcgcatttgctcgcgcacctcatcgagtacatcctcgcttaatggcaattcatatattggcctgactgctggaaaacccgcctcacgcatcataaatgcccatgtcatgggtacgggagccctgagatgctgatccatccgggacgcgttcttacacaaaggggaatagcactgcatggttaaaccgactacctgaaaattcgtttttgctttcaactgactgataaataacatcgttttcaggttctttttacgcatcgcctctatacaaagatccggcgtaccgtattgctgtgttatgttcttcgctaaatcttttatttcttttaatgttgcgtgatcctgcatagtcattgtgactaatgttaatttagtctgttcaagtttgagcgtattaaagacttctaaattaattgtcgaagtaacaattaaaagacgcttaattttatgcatttcaagcgcccgaataactggaaagatggccatagcatcgccaatttgatcgggaatatggataacaacaaagtctgttttttcaatattgaaattataagctttataatcgtagtaactaaatgcaatacgtctcaacaatgatgctaaaaacataattaacctcgcctccctactggttataatgcaatgcagtctatcagaatcatcagggggcaattttgtgcatatgcggacttttatgtttcatatctcaaaactgtaggtgccctgcttaatccttatgcaactcctgcgctttcatcttccatcgaatttttcatgttgccgttaatcagccataaaatcatttgcagatgcgctctgtcgaggtagtctcataaggttcgtttatagatcgacggcaatgtgagttaccttttccatactaattataaaaagacagtacaaacaggatcattatggactccacgctcatctccactcgtcccgatgaagggacgctttcgttaagtcgcgcccgacgagctgcgttaggcagtttcgctggtgccgtcgtcgactggtatgattttttactctatggcattaccgccgcactggtgtttaatcgcgagtttttcccgcaagtaagccctgctatgggaacgctcgccgcatttgccacctttggtgtcggattcctgttccgtccgctcggcggtgtcattttcggtcactttggcgaccgactgggacgtaaacgcatgttaatgctgaccgtctggatgatgggtatcgcgacagccttgattggtattcttccttccttctcgaccattgggtggtgggcccccattttactggtgacgctgcgtgccattcagggatttgccgtcggcggcgaatggggaggcgcagcgttgctttccgttgaaagtgctccgaaaaataaaaaagccttttacagtagcggtgtacaagttggctacggtgtaggtttactgctttcaactggactggtttcattgatcagtatgatgacgactgacgaacagtttttaagctggggctggcgcattcctttcctgtttagcatcgtactggtactgggagcattgtgggtgcgtaatggcatggaggagtccgcggaatttgaacaacagcaacataatcaagcggccgcgaaaaaacgcatcccggttatcgaagcactattacgacatcccggtgctttcctgaagattattgcgctacgactgtgcgagttgctgacgatgtacatcgttaccgccttcgcacttaattattcaacccagaatatggggttaccgcgcgaacttttcctcaatattggtttgctggtaggtggattaagctgtctgacaattccctgttttgcctggcttgccgatcgttttggtcgccgcagggtttatatcacaggtgcgttaatcggaacgttgagcgcatttcctttctttatggcgcttgaagcacaatctattttctggatagttttcttctccataatgctggcaaacattgcgcatgacatggtggtgtgtgtacaacaaccgatgtttaccgaaatgtttggtgccagttatcgctatagtggcgctggagtcggatatcaggttgccagtgtggttggcggtggatttacacctttcattgccgctgcactcatcacttactttgcggggaactggcatagcgtcgccatttatttgctggctggatgcctgatttccgcaatgaccgctttgttgatgaaagacaatcaacgcgcttaatagcctggcgaagatcatccgatcttcgccttacacttttgtttcacattcctgtgacatactatcggatgtgcggtaattgtatggaacaggagacacacatgaataataagggctccggtctgaccccagctcaggcactggataaactcgacgcgctgtatgagcaatctgtagtcgctttacgcaacgccattggcaaatatattaaaagtggcgaattacctgatgaaaacgcccgcaaacaaggtctttttgtctatccatcactgaccgtaacctgggacggtagcacaaccaatccccccaaaacgcgcgcatttggtcgttttacccacgcaggcagctacaccaccacgattactcgccctactctctttcgttcgtatctcaatgaacaacttacgttgctgtatcaggattatggtgcgcatatctcggtgcaaccctcgcagcatgaaatcccttatccttatgtcatcgatggctcagaattgacccttgatcgctcaatgagcgctgggttaactcgctacttcccgacaacagaactggcgcaaattggcgatgaaactgcagacggcatttatcatccaacggaattctccccgctatcgcattttgatgcgcgccgcgtcgatttttccctcgcgcggttgcgccattataccggtacgccagttgaacattttcagccgttcgtcttgtttaccaactacacacgttatgtggatgaattcgttcgttggggatgcagccagatcctcgatcctgatagtccctacattgccctttcttgtgctggcgggaactggatcaccgccgaaaccgaagcgccagaagaagccatttccgaccttgcatggaaaaaacaccagatgccagcatggcatttaattaccgccgatggtcagggtattactctggtgaatattggcgtgggaccgtcaaatgctaaaaccatctgcgatcatctggcagtactacgcccggatgtctggttgatgattggtcactgtggtggcttacgtgaaagccaggccattggagattatgtacttgcacacgcttatttacgcgatgaccacgttcttgatgcggtactgccgcccgatattcctattccgagcattgctgaagtgcaacgtgcgctttatgacgctaccaagttagtcagcggcaggcccggtgaggaagttaaacagcggctacgtactggcactgtggtaaccacagatgacaggaactgggaattacgttactcagcttctgcacttcgttttaacttaagccgggccgtagcaattgatatggaaagtgcaaccattgccgcgcaaggatatcgtttccgcgtgccatacgggacactactgtgtgtttcagataaaccgttgcatggtgagattaaacttcccggtcaggctaaccgtttttatgaaggcgctatttccgaacacctgcaaattggcattcgggcgatcgatttgctgcgcgcagaaggcgaccgactgcattcacgtaaattacgaacctttaatgaaccgccgttccggtaataagttctgttcctttttatcaggaatagatgtgaaggatttagtaagtcatccagcaaatagcctgcaataaacgcgggctgtttgcttccttgggcagatgcgagttttattatcgtcttaatgatttccacatattaaaagcaagtatgctttcaaaacacaattataaaaaatcccgccaacaacattagtttttataaaattaaatataagattatggctttagaatatttttatttctaatagacgagatttttcctgttatgatataatatgctgaattaacacatgttaacgatttaccagtaatgtaaataaattttcgaggagatcattccagtgggacgtaaatgggccaatattgttgctaaaaaaacggctaaagacggtgcaacgtctaaaatttatgcaaaattcggtgtagaaatctatgctgctgccaaacaaggtgaacccgatccagaattaaacacatctttaaaattcgttattgaacgtgcaaagcaggcacaagttccaaagcacgttattgataaagcaattgataaagccaaaggcggcggagatgaaacgttcgtacagggacgttatgaaggctttggtcctaatggctcaatgattattgctgagacattgacttcaaatgttaaccgtacgattgctaacgttcgcacaattttcaataaaaaaggcggcaatatcggagcggcaggttctgtcagctatatgtttgacaatacgggtgtgattgtatttaaaggaacagaccctgaccatatttttgaaattttgcttgaagctgaagttgatgttcgtgatgtaactgaagaagaaggtaatattgttatttatactgaacctactgaccttcataaaggaatcgcggcgctaaaagcagctggaatcactgagttctcaacaacagaattagaaatgattgctcaatctgaagttgagctttccccagaagatttagaaatctttgaagggcttgttgatgcccttgaagatgacgacgatgtacaaaaagtttatcataacgtcgcaaatctctaatgatattttaaagaaatctgtctttatggcagatttctttaatctcatataattcttataaaaaatataatgtttaactcgtcatattgcttataaaaaatccccgttcccagagaaataatatttattaaaatggcaggtcttctttttctgattaccgaagacaaagtggcaattacgtatagtttcccgataaagacgcgacagctacatcccgcataaggcatttttctctttatctttgtacggtacttcatggaacagaatttttgaccctgtgaatcgtgatgtctgttggggaggggcaatttgctcactgaagcgtgagactcgattaagcgcacgaaacacagaaatcaaaaaacccggccactttttttacaaagcggccgggtaaaaataatttttattttttaactgttttgagacttatagagatatctcaaaactaaaatttggctcctctgactggactcgaaccagtgacatacggattaacagtccgccgttctaccgactgaactacagaggaatcgtgagaacgaggcgaatattagcgacgctcatccacaatgtcaaagcctgttttttaaatttgaaatcgtttgctgaaataatctgcactttgtcgtttattccgacacaactggctttttttcacacttttgcggctcaggtcgaggatatttccacagccaacgtccagtaaccattcgccagtaaaacagcacggcccgcacagcccagtcggcaaacattcccatccagacaccaaccacaccccagccaagcatgattcccagcacataaccgactacaacccggcaaccccacatgctcaacatagaaacccacatggcgtaacgtgcatcgcgagcacccttaaatccagcgggtagcacccatgaggcagaccaaataggcataaataaagcatttagccaaatcagaatcacaacgacatgtttaacctgtggatcctgggtgtaaaacgatgccataaccccggcaaagggagccgttagccaggcgatggccgttaatccaagagtggaaagccagaacacatgccgcaactgaatctctgcttgcgctatctgtcctacacccaaccttcggcctgtaatgatcgtagaagcagagccgagcgcacttccgggtaagttgataagagccgcaattgaaaacgcgataaaatttccggcaataacactggtccccatcccggcaacgaacatttgggttaataaccgaccactggtaaataacactgattcgacactcgcgggaataccaatccccatgacttcccagataatgctaaaattcagcggtttaaaatagctctttaacgaaatccttagcgcaggattaaaaccaatcgccagcacccacaaaattgccactgcgccaatataacgagaaatggttaaccccaacccagccccgacaaatcccagtcccggccaggagaaaaggccgtaaatcaatatgccgctaataataatattaagaatattcaggctaccgttaatcagtagcggtattttcgtattccctgcaccacgaagtgccccgctaccaatcaaagtgatggcagctgctggataactgagtaccgtcagctccagataagtcaacgccagtgctttaacttctgtcgtggcatcacccgcgacgaaatcaataatttgctcgccaaaatgatgaataagcgttgccaacagtacggcaaacaacgtcatgatcaccaatgactgccgcgtcgccaccctcgctcgtcgtcgatcccgcttaccgagactaaatgccacaacgacagtagtaccaagatcgatagcagcaaaaaaagccataatgaccatattgaagctgtccgccaatcccacgccggccatcgcatcttttcccagccagctgaccagaaaagtgctcagaacccccatcaacaggacacaggcattctccatgaagataggaacagcaagcggggttatctcgcgccagaacaacactttgtagctcttgcgtttagcgtgccagcgagtgccgtgaacaacctggcgtaaagcagaggagatattcaaagccgaccttaattgcagaaagtgaaaccacatttcaaataatgagggagaatcagcaaagctgcaaagattttcgccaacaaattgtctgcaaatgcaacaaactgttgatagaaacggcaaacagttgggaaaattaaaaatcgggtttgacaaaagatttttcgccgttaagatgtgcctcaacagcgattcctctgtagttcagtcggtagaacggcggactgttaatccgtatgtcactggttcgagtccagtcagaggagccaaatttctgaaaagcccgcttttatagcgggctttttgctatatctgataatcaatttcctcttcactgttttccatcacctgccgcttgatatcctcaactgaaagtcctgcattacaaagttccagaaagcgccagacatagttacgctgaagttgtcctcgcttcagtcccaaccagacagtattagcatcaaaaagatgccgcgtatccaggcggattaaattcttttcctcttgttcaccgctggattgttcggcaactattccgatcccaagcccaagagcaacataggttttaatgacatcagaatcctgcgcacttaatacaatatctgccagcaaacctttgcgggcaaatgcgtcatcaatacgtgagcgccccgtaatcccctgtcggtaagtgattaacggccacttcgctattgattccagcgtcaatggtgtaatttgcgtcaagggatgatcgagtggaacaagcaaactatggtgccaacgaaaccacgggaaggcgacgagctgcgggtcattactcaaacgctcgctggcgataccaatatcagcttcaccattatgcaacaacgtcgcaatttcctgtggcgtcccctggattagctcgagccgaacctccgggaaaagttcgcgaaaagatttaatgacctctggcaaactataacgtgcctgagtatgcgtcgttgcaatagtgagaacgccagacgtatcgttggtaaacaggtctgcaagccgacgaacattactggcttcattcagaatacgttctgcaatgaccagtaatgctttgcccggttcagtcatgcccagcagtcgcttacctcgtcgaacaaatatttcgatgccaagttcatcctccagttcccgaatatgacggctgacgccggactgtgaggtaaaaagcatattcgcaacctctgtcaggttgtaatcctgacgtgcagcctcgcggattatctttagttgttggaaattcacggtaaactccgggcagttcagattttccgttattgttaaagtctaatgcccggcataacaaataataaaaacccgcatcttattccatcccgatataacgcttagctcaccaattgccactgccttttttccatcactggagaactcatcactgacattaacaactctttcactgcctgtgcctgtggtgataagttcgctctggcgggtaaatttaatgacaaagagagactcatggaaggtgtggtaatgcgtgacatccacccgtttactgcgccacataacgaacgcgcggccgattcgggtaatactgcaacgcccatgccgctggcaatcgctgcggtaagcgtggcaatagactcaatttcaccaatgacttttgccgtgagtcgccgtagggaaaaagcctcatcaacacgaagtctaacagcactgtaatcactgggaagaaagaggttcatttgcgcaatagcattaacatcaacgctttgccccggacaatcttgagtccctaccaggaaaagatcttctttcagtaaagcctgactggatacaccagccacaggggaatgctcataaatcaccgccatatcgagttggtgatttatcagtttttcgttaagcactgcaccgctattttcatgaagatagataacgacctccgggaattcagcgcgaaccgcctgtaataagggcatggtgatggatgacgcagcggttcctggcgcaaagccaatcgagacttgccccgataatgcctgaccaacgttatgcaccgccagttgggcctgctcacactgacgtaaaatggcccgcgcatgggtatagagaatttttccggcgtcagttggcgtaacgccccgttttgtgcgaatcaaaagttgttgattaaactcaccttccagtgtggcaacctgctggctgagcgctggttgtgcgatatgcaatacttcagcagcctgggtcaggctaccaatatctacaatttttacgaagtatttcaggcgtctgaagttcatgttgcctccggtttttaagagtcggcccaagtgccgccattacttacaaccagaatgcaagatgcttgccagttctattttggcgttgatgcgcaagctaaccaactgtcaaataagagattatgatagattcgtcattggctctttttatctgcagtcgcattcacctgccctataaaaggagggtatgcaccacgatggttcattacccaataagattgaaagctcaccactttgttgaaattggcagcaaacaaacaaaaaaatgcatttcaccctttgacatcaccatgcactgccattaatatgcgccccgttcacacgattcctctgtagttcagtcggtagaacggcggactgttaatccgtatgtcactggttcgagtccagtcagaggagccaaattcaaaaaagcctgctttcgagcaggctttttactttctaattatcaacgctcttaaaacatctgtcttgaaccagaactaatttgcacaggcattcccgatcgacgttgcaacgcagcatttgcgcgatttacatcaacttcttgcccgttgataaacgcccgcaaagatggggttaccggcaatggcacttttcggtcagactcatattctgcacgattgcgcgacagcggctcatgaacttccagccactttgaaccatccggttccgttgtgtatttcactggctgatcaataatttgtacacgagtgcctacaggaacattatcaaacagatatttgatatcgtcattacgcagacgaatacagccctgacttacacggagcccaataccaaaattggcattggtaccgtggatggcatacaacctgccaatataaatcgcgtacagccccatggggttatcgggccccgcaggaacaaatgcgggcaaactctcccctcgtttcgcatattcgcgccgggtgttcggcgttggcgtccaggttggtgcttcttgtttacgttcaacggtagtcacccagttacgcggggtttctcgcccagcctggccgataccaataggaaagacttccactgtattactgtctggcggatagtaataaagacgcatttcagcgacgttaaccacaatccctttacgaacagtggcgggcaaaatcagttgctgcggaatggtgagttgtgagccaggcttcggcaaaaaaacatcagcgcccggattcgcttccagcatattacttaacccttgcccgtattgtgcggcaaaagtctccagcggctgagtattgtgatcaggaacagttacagtaagcgactgccccactaaacggctaccctctggaggtaatggataagttaccgccaggctattttggctggcaaaaagcagagcaaatgagcaaaaaatatttacacgacgcatcatgtccctttcctaagtcgcgaaagctatccgttaagtatagcttttatcagacttttcgtttttaactgttcaaatcagaagtcgtattccccggtagaacaatattactggcagcaagttcgcccatgttgttatatatcgcacaggcagcttcgatgatgggcatcgccagagctgcgccactcccctcacctaaacgcatctccatattgagataaggctccagccccaaatgcgacagcgcaatacgcgcccctttttctgccgacaggtgagaaggaatgagatacggtttgattgcaggagacatctggcaggctgcgagcgcggcagcataagaaagaaatccatccagcaacacgggtaaaccgcaggaagcagcgcctaacatcacgccagccattccgaccaaatcaaatccacccacttttgccaggacatcaacgccatcctgcggatttggttgattcaacgtaatcgcccggcgcacaacatcaattttattagccagtttatctgtcggcaggtttgcgccaatcccaaccacttcttcaggatcccggccagtgattgtgctgactattgccgctgccggtgtcgtgtttgccatccccagttcacctacaccaaacagcgtgacaccgttttttgccagctcccgcgtataacatatgacgtccaaaagcaacttttcagcctgacggcgactcattgccggagctgaagcaatattgccgctacctcgtgcgacacgcatgttgataagcccggggataggctcagcactatcaataccaacatcaactacgtggacgttagcgcccgcttgtgctgccagcacacacacgccggttgttccgcgggtcatattttcagcctgaatggctgtcacttcttttggggaaatagcgaccccttcctcccagacgccgtgatcggcacacataaccagtaccgcttttttgcccacatgcggtatgccattcaaccccggcattcccgccagttgtatggcaagcgcctccagccttcccaggctaccaacaggtttgagtaacccgtcaatatgccgttgtgcacgcgacatagcggcaggatcgatagcagggatcgtattcagtaaatcggcaagtgtttgcatgtcacgtctctttatagcagtgccagcaggaagaccagttcaccaagctctatagcagctcccagcgtatcgccggtttgcccgcccagcgtacgtttgagaagctgaccgaggatgaaaatcgccaccatcgtcaccaccatagcagccacaccatgcatacccggcaataatacggcagcaaaaatagcggctaagccgagtgtgacgcaggtttgtcgcccatcaattttgccaatgaacacattgccaagcccttcttcccgcgcataacgatgacgatacatcaataatgcggcagtcccgcggctgaccgcacatgctgccgccagcgatgcaaggatcggttcgccacgcagagccaactcgcttaataccagaatctttgccagtacaacaaaaatcaatgccagaccgccatgggtgcctaaacggctatcacgcatgatttccaacatgcgatcgcggctacgtgcagaaaatacgccatcacaggtatcggcgaggccgtccaggtggaatcccccggtcatcagcgccagcacaagtacgctaaacagtgccgccagtggtacgccacaccatgcctgcagcaccatgaagaccagcccgctaatcgcgccaagcaataatccaattaaaggaaaagtaataataccgcgagaataatgctcgaaatccagtccctgggaccagcgacgcggtacaggcagacgcgtaataaatgagagcatcgcccaaaataatttactcatttgatttttactccaatacccgaaaccaccagccatacttcatttgccgcagcggccaactgctgatttacccgcccggcaatatcacgaaaatgtcgtgccagacgactctccggcacaatccccattcccacttcgttagtcactaatacaacctttgcggggcaacgttggcaggcagcaatcaacgactgaatctcagcattaatcgcctgttccatcgcctgataatcccattcatcagggtctttatcgccgccataatcaaacaacagattagtcaccattgtggtaacgcattccagcaacacaacctcattcgggttaatgtctgcatgaattaattcatcaagatgttgccagcgctccactgtgcgccagtgctccgggcggccttgccgatgatgttctatccgtgcagccatctcatcatcaaggatttgcgaggtagcgatatacagaacctgtgaagagtccccaataagcgcctctgcgtggcgactcttcccgctccgtgcgccccccgtcaccaaaatcatcataccgactcctgattcaaatgtatgatggtattcattgaacagaacaatggatcccccaccgttgctgaccgcaaaacatttacgcgattaatactgcgcgtaatataattaaaaatccagcattctcaatccattacgaaataagatggcattacggaatagccagactttctcgtgttaacgtccgacaaaatgtgtcattgacagcggtttctgtggattgacacatttcattcagataatgaattaatgctactgccggaccaaccagcaaacgggcattgtgttctgaaatccaggctattgattcaacgtcagcgacagatctgcgctgtaaaagaacttgtaaaacaacgcaatagaattatccggaatggtggcgactatgcactagaacaccacaatttcgctctctcggtaaggcactgtcacagcattcaacagaatgtgacttgccagatttattagcgccaccagatgtttaaccgggtaaccacgacccagtcggggatatattccatcttctcgctgacatcatcaagaataaaaaggtttatcacactcagagcaacgttcttcagcaggcgggataattcttcaacatttaaaagatgtgttattaaaggcatacaaactggacgtattgtattttcttttggtggttgacctaaggtagcagtttatcctgatgcgctgagatttctgtaatatctacgtcaacattctcctcgaatagaaaatgcagccccggcaagtgattcacattttttaacaaaacgttgttagcgtgccattttcagaagctctccaagaaagcgaattcttttctcaaattctgcattctcagacacagctttctactccatggcaatggcccaaatacgaagttgctcaggatcattagtggtgctgagaagttaaataaccatgcggagtaccactcgtcatcacgtatttatatatcatgaagctattgttgtgttttgtacatcagtagatgtattctgatatactccttttgctagacataacctttcacctgcttgcaaagcttctgtgttctgacattgccaaattgttgcaattctgtatccagccttctttcagtcatagcttcgggccgcgataagactcactgatctgaccctgattcctcttgcagactttatagaccaattaaaatgcagtttctgcaggtcaacgtctgaccatcattgtcatcactctggccattagagtaaccttctgcattcatccttttgtaaaaagtttatagactggccccctgaatctccagacaaccaatatcacttaaataagtgatagtcctgatacaagtttttagagtagtcattagtgaacagataattgttaacttagaaccagtaaaatgcaaacgacgcaccacgctgggaaaatcgctgctattcagcagagttttgtaccgagaattgtggccagccacttattgctctcgcgtaagcaggtatccccatcgtttaccagtccagcacatcttgtggtcaggcagaagaagagcaaactgttactggactcactgcatgcatggtggagaaaaatgccacgctatccaaaaatccagactgggagaatggttcagctgtgtactgaatcagtggggcgcactctgttattacagtgttgacggtcaggcggaggcagacataatgccgcggaaaaagccctttgtgccatctgtctcggaaataaaaactttatgttcttcggcggcgagcgcagtgcactgttgtatgggcttatcggcacttgccttctgaacgacattgatccggaagcgtatctgcgccatatcctgagcgtactgccggaataaccttccaaccgtattgatgaactcctgccatgaaacgtagttctcaccaataaataagcatcaatatgattctccattaacgcttaccttttctcaggctatttttgcttttttttgcttttccccgccactttatggtgattatcacatcaatatacatcgatagatattaacgtaactgcagtgaggtgaagcatgaaatttgaacgccatcatgaaatattgaaacgactcagtaaattcggttctgtaaaagtatccgatctgtccaatagcctcaatgtaacgaaagaaactattcgttcagatcttaatgaacttgccaggcttggctatctgactcgatgtcatggtggtgcttttatcgtcctagactcgcttgatactattgcgaaaaatgaaatcgcttatgcgcttgaaaattatgatacagcccagggaataaaaaaaggccactcaactatgaaaagtcaagtatgcgttattggttcgtttaatgttgatatcatcagttatttgccgaggcttcccactatcggagaatcgcttctggcaagtaattttatattttcaccggggggaaaaggctgtaaccaggcgctggcagcaagctttgccgatactgatgtttatttcataacaaaagtaggtacagatcactttagtgattatgcgctcaactttatgaattcgtctaagatttataaaagtataatttatcaaacgaaagaaacgcaaaccgaaactgccacgatccttgttaatgaaggtactggcgataatgttattgcgatctatcccggtgccaacatgacaatgtcgtccgatgaaataactattcagaaagaagcgattattaattctgatgtcatacttctgcagctcgaaacaaattataccgctctgcaacaagcgatcacattggcgcaaaaaaacagtatcccggtcattattaacccggcaccctataatgatatcgtcaacgaacttattcaggatgttgattatatcacccccaatgaaacagaagctggtttactgtccggcatagacgtacacgatcttgaatcagctaaacgagctgcagaagctatccacaataaaggggtaaaaaacacggttatcacgctcggtagcaagggctcgctcgcatttgatggcaaaaaattcattcattcgccagcgtttccagcggtcgttaaaaatacggcaggagccggggatgcgtttaacggctctctggcatcaggacttgcgaaaggaaaatcactggaatcagcactgtgttatgccagcgcctttgcatccctagcggtggagacaagcaatgcttccgacatgcctgaacatgaatctgtgatacatcgaattcagagtatacattatcagcaaactatttttacgcattaagaagggacagagaatgaataacaccaaaaaatcactaaaagtgctctttattggggaatcctggcatattcatatgattcattcaaaaggatatgacagttttacctcaagtaaatatgaagaaggtgcgacctggttactccagtgtctgaaaaatagtcaggtagatgtcacctatatgccagcacatacggtacaaattgccttccctgaagatgtggcacagttagaacaatatgatgccatcgttattagtgatattggtagtaatactttcctgctacaaaatgatactttttatcagcttcgcataaaaccaaacgctctcgaactgattaaagaatatgtgaataacggtggtgggttattgatgattggcggctatctctcattcatgggaattgaagcaaaagccaattataaaaatacagttctggctgatgtgctcccggttacgatgttagatggtgacgatcgtgtcgaaaaaaccagagggtgttattgcacagccatcacaacctgaacatccagttattaaagggttctctgaatatccttttttcctaggttataaccgggcgatcgctaaagaaaatgctgaggtggtattaacaataaacaacgctccattactggtctttggtaactatcacaacgggaaaatagcctgctttatgagtgactgttcaccgcactggggtacacagcagtttatgtcctggccgttctataccgcgttgtgggtaaatatactgactcatattgcaagataataataataatggggtaactccagttactccatttactataatagaaggattgatgtatgaaaaagaataagtactcaactcccttatggatgcttgccacgattcttgcgggtatgctctcccctatgcaatcagcggtgaatggtcaattaggtcactggttacaggatggtaatgcatgcgcagttatctcctttgccagtggtttagtcgtgatgttttttattattatggcgcgaaaagaaacccggcaacaatttgcggcaattccttctctgattaaaaaccgaaaagttcctctctggaactggtttgccggtctctgtggagcgatggtggtattttctgaaggcgcatcagccagcgcactcggggtcgcaacgtttcaaaccgcactgatctccgcgctattgctgtctggtttactttgcgatcgctttggtatcggtgtcgacgagaaaaaatactttaccccttatcgcatcatcggtgcattatttgcggttattgctacgatttttgttgtgtcacctcagtggcattctacctctttcatcttacttgccattcttccgttcttagctggtttgcttgcaggatggcagcccgctggaaatgcaaaagtagctgaagctacgggatccatgctggtttcaatcacctagaatttcatcgttggattttgtgttttaggcacagcgctagctattcgtgtcgcattagggcacgtcactgttcaattaccagatgtctggtggatgtatcttggcggcccgcttggactaatgtctatcggtttaatggccattttggtcagaggtctggggttactgatgctgggggttgcttcaacggcgggccagttactgggatcagtattgattgacgtattaattccatcgctgggcaatagcgtttatctggtcacgatcatcggaacactgtttgcactggtcggtgcaattgttaccactattccggaatacagaacctcgaaaacaatgaagaaaatggaggtataatcatgaaagattatctacaaactgtgacgggccccgtcgcccgtgaagatatggggctaacacttcctcatgaacatctgttcaacgatctttcctctgttgtggatgctccttgctatcctttttcacaacggcttgttgataaaaaagtcacggcagaaatccagtgggcattaaaacacgatccttattgctgcgctgataatatggaccgcaaacctattgaagatgtgatcttcgaaattaataactttatctcgctcggtggtcgcaccattgttgatgccacagggtctgagtctatcggacgagatgcgcaggcattacgagaagtcgcattaaaaacaggtctgaatattgttgcttcctccggtccctacctggaaaaatttgaaagccagagaattcataaaacggttgatgaactggcgacaacgatcgataaagaattgaatcaagggattggcgatacggatattcgtgccggaatgatcggtgaaataggtgtttcaccgacatttaccgaagccgagcataacagcttgcgggctgcctcgctggcacagattaacaatcctcatgtggcgatgaatattcacatgccgggctggcttcgtcgcggtgatgaagtactcgacattgtgttaggtgaaatgggcgtctcgccaaataaagtctctctcgcacactcggatccgtcaggaaaagacgtggcgtatcagcggaaaatgcttgataaaggtgtctggctggaattcgacatgattggcctagacattaccttcccgaaagagggaatagcgccaggggtgcaggagactgccgatgccgtcgctcatctcattgagttgggatacgccgatcagcttgttctcagccacgatgtcttccttaaacaaatgtgggctaaaaatggcggtaatggctggggatttgttccagatgtttttctggcctatctggcggagcgcggcgtcgataaaacgatcctcaaaaaactctgtatcgataatcccggacgattattgaccgcataaaaccattatcccccggcacattgcgccgggggatgtcaattaataccccgccgttaaatcatccaccaagcgcgagtcggatgcgccgtacaactcaccatccgacccaaccataatgctttgcgtgctgcccatcgcctcattcagcgccactttctgaccttttgcatccagcagcttgagcgtatccggactaaacccttttcaacacgcagctcgtccggcaaccactgatagtggaaacgaggcgcattggtcgcttcggcaacattcattccacaattgatgctgttcaccaccatttgcagcacggtagtgatgatccagctaccggtaacaaagtgagtacataaaggccatactgtcacgaacagtgcaaaagtggctcttccgcaacctgggtgaagattttcatgccagtggactcattaccctccgcctaagtagttcaagtccggctcgaccatacatctggcgtatcagcaccttcaggcgatttacatgaccttcgacaacaccagtactccagcgactgctgattgcctcacatatagccgcagcatcagcttccatccccgcagctacgcaccgaagttctgctgagccgctttcgtggacccgagtgaaccagctgcttagctgtgatttattttaggttttcagaatacggtagaactcgagtaccagttgctgcgctattttcaactccggttctttttcacacatcagactaataaatcggaaagcataattttcttcacccctgattattctccagggcatcaaccagcggcttacccgggacactgaaggaagtcttgcggcagtagtaaccggtgggatccagcctttacgccatttggcaacagcatccctgacgatggtttcactgcctgtaacccccctggccaccatttcccgccatatccggccggagttataattaccacattctcgttgctcttttaaccactccctccatgggtccagaagccctcgctttggaggcctagttgacatttcagggaatgttcctgaacccacccagcgactgactgtcactcgcgacaggcctgtaatacgggatatttccctgaaactacatcccttgttatgcagggccataacctctgtccaacgctgatgccgttttttgcggatgtgctgtttaaggcgttccagacgacggagcgatgctacaggcacagatatttctggctcaggtgatttcttcagtgataactctctgacaacaagacgtatcagaggcatatgtctgtacatcattcgttcaggctcatcaccaatattttttagcaggtgccatcgatcggccacctgtctggcctgaggtgcaccttcacgtgctgctgtcgcatagactccactgcgatcacgcgagacaacctgtatttccggatattttctgaaccaggtcgccagcgtacgctgatcacggccgggaagcaggacgaggggacggtgagtatcaagattgactattaacataccgcagcagtggccccgatgccacgcccactcatcaataccgacatgaggcgcgcctgactgtttcgtctccggggtattgataaccctgcgaagaagagtatcagcactgcaacggagacccgctgccgttgcagcccgttttccagcctcacctccagctattaatcccagttgacgttgtaaattttgtaacgcctgtgaagactgctggtgtgaaccggcgaagggagcaagcgactcggcaaaaattttacgtgaacaagccgggttacggcagtaccagtggcggacggaaaatacaagccatagcgtctgccctgagcagggtagatgctgtattggcgcgccagtcgtgctcaactccggctaaccgcgctgaaatgagcccggaagccgccggtattgccgcctgtctgatgacgtacagtcatcatgcctgtcgtatggagaattatgccatgacggtccattattaccggttgcgggattacgccctgcagcatccggaatgcagcgccattatgcgcatcatcgactgaatggagagaagcacaatgcaacaactttcctttctgcccggagagatgacgcccggcgagcgcagcctcattcaacgggccctgaaaaccctggaccgccatcttcatgaacccggcgtggccttcacctccacccgtgcagcacgggaatggctgattctgaacatggcgggactggagcgtgaagaattccgggtgctgtatctgaacaaccagaatcagctgattgccggtgaaaccctcttcaccggcaccatcaaccgcacggaagtccatccccgggaagtgattaaacgcgccctgtaccacaatgccgctgccgtggtactggcacacaatcacccgtccggtgaagtcacacccagtaaggcagaccggcttatcaccgaacgtctggtacaggcactgggcctggtggatatccgggtgccggaccatctgatagtcggtggcaaccaggttttctcctttgccgaacatggtctgctttaacccgtcacaaccacatcacacctgttttcacttttatcttctgtcttcagaggtatcccattatgaaaattatcacccgtggtgaagccatgcgtattcaccaacaacatccgacatcccgtctttttccgttctgtaccggtaaataccgctggcacggcagtgctgaagcgtataccggtcgtgaagtgcaggatattcccggtgtgctggccgtgtttgctgaacgccgtaaggacagttttggtccgtatgtccggctgatgagcgtcaccctgaactgagtgggaattctgatgagcagaattatcgccactaccggaccattcttagccgattttctgtaaggattttatcgtgtcagacacactccccgggacaacacttcccgacgacaatcacgaccgcccctggtgggggctgccctgcaccgtgacgccctgtttcggggcacgtctggtgcaggagggtaaccggttgcattaccttgccgaccgcgccggtatcagaggcctgttcagcgatgcagatgcgtaccacctggaccaggcctttccgctgctgatgaaacaactggaactcatgctcaccagcggtgaactgaatccccgccatcagcataccgtcacgctgtatgcaaaagggctgacctgcaaagccgataccctcagcagttgtggttacgtttatctggctgtttatccgacgcccgaaatgaaaaattaactctccagaatagccttctgctacggcctggtgttttcaccacgccacttttccatttttatatctgcatatcaggaaaatcttcagtatgaaaacattacctgtattacccgggcaggcggccagttctcgcccgtctcctattgaaatctggcagatactgctgtcccgactgctggaccagcactatggcctcacactgaatgacacaccttttgccgatgaacgtgtgattgagcagcatattgaggcaggcatttcactgtgtgatgcggtgaactttctcgtggaaaaatacgcgctggtgctaccgaccagccgggattcagcgcctgtacccgctctcagttaataaacagcatcgatatcctccgggctcgcagggcgaccggcctgatgacccgcgacaattacagaacggtaaataacattaccctgggtaagtatccggaggcgaaatgatgacactggaagccgacagcgttaacgtacaggcgctggatatggggcacattgtcgttgacattgatggtgttaatatcactgaactgattaataaggccgctgaaaacggttattcactccgcgtggtggatgaccgtgactctaccgaaacaccggcaacttatgccagccctcaccagttgctgtaagacaatgcagtgatgcagggtatagtgccattaaccacagaaacagcactgttgtcctgtattaagcaggcaagagaagatgtccttaccctgcgccatctgcagcttctgcaccagaaccggtgaatctcactcaacaggcttcatttcccctgacgccagcctgaatacagctggcgttttcatttataaacagaaaggaaaaccgataataatggaatggacgccccgaccatgaagcaacggtaggatattactgataaaccttccagtggaggtgcgttatggccgttttaacgattagcattgacctgacaaaaaatgaattccaaatccacggtctgggtaggaacagaaaaatctaagctcagaaaacggattaaagtaagcgtcaacggagcaccgtattgacgcttatttattggtgagaactacgttccatggcaggagttcgtcaacacggttggagggccattccggcagtatgctcagaatatggcgcagatacgcttccggatcgataccgttcagacggcaggtgcctgcttttccggcaacaagcaggaatctcagtgctgaagcaggaattagaggtaaaaacgccctaccgggccatgaatcacccggtcattggagtagtaaccaaagcagatttagccagcatggaacaaatatctttggtgaaaagttggttacgggaagctggagcgcacaacgtgttagtaaccagtgcagttaataacaatggagttacagaactttttgccttgctgcatacagaagaaggctgttgttaatttcgattggttctcagatgagaatgatgacggtgatacacagataagaatcaatgagcaatgagggttgccgggcaaccctcattgaataaaacgggaattacttcgcttcgccgtttttcatttcgcccatagctttcagctttttggagatatcgcggcgttctttggagagctcggcatttttgatgatgtaatcgtcaacgcgatcttcatagtcacctttcatgctggcgatgatgccctggattgcttcaacgctcatccctggcttgatgtaatcgctcaggttgtccagcaacaggacgcgcttctggttgtcacggatctttttctcaacgtcctgaatttcacgttgcagtttgttcttacgacggaacagacgaacaaattccagtacgtcctggaatgaaggcttggtagtttccatttttatacccctgataatgtgagagtcggattcgtttaagcaaccgctattcgttagggccaacattactcatagctgccgcagatgacaatgcttttatcccttttcactatcataccctttatccttgctgaatcgaagcagcagcaagatgattctgaagttcaggaattatttgcgcaaggcccggcaaatcagattcgatagcaactcaagctgatgtgccgtttccatgttcagccacacataaccatagattggtgtttccacaaccttcaggtcatggtggttattcagcaactgacgcagctcttccacagcatcgttcaatttttccgtattggcaaaaaccggctgcggattaccttcgtacagcgcatgaacaaggctcagcagtatttgctgcatcatatgctgggtatcacgaagtttttgcgcgttcaataacacgaaatggctggggcgcgtggcccagtatgcattgatttgcaactccagcatacaaaccagattgcgattaatggtctggataccttcatatatcgattttggaatacgggtttctttgctggcgggcgcaatcagcccacgcattttcacggcatcggtcaggagtttttgtagatggctttccagacgcgggcgttcgagtaagttcggtgagaatgcagattgatagacccgattatactcggtcagactttttgccagttgaatgcgccagtggatgaacgcccgttgtggccagataccggtaaacaacattgccagtaaagagccgaggatcacatcgccgcttcgccataacgccgtattaatttcacctgtcggggaaccaacaacaattgccagcgtcaccccaatcaataaaccttgatacggtttcttgcccagcgccagccaaccgcaaagaaacatagccgccgcgcaccagactaacatcagcggtaacgagattaactccagttgcagagcgataagacctaaaatcgaccccaacaccgtaccgccaatacgttcgaatgcgcgagggacaacgttcccccagaacgagattggccccataatcaccaccatggtgaccagcggccaggtgctttccgggatagtaaacaggcggataatgagaaaagtgagcaggaatgccagcgcgacccgagtaccatgcacaatgcggtaatggcggtatacccggatttcaaacgggcttaatgacttatcggcacgcacgcagaaactccgtaatgaagattaaaagcgctcataactcatctgtcgaccagaaggcgcgcctctgaattatccgacggacaaaccgggaacagtgtaatttcccggcaggagcgaaaaaattgaaaggcgcatcttactcttttcgctttcaaaaaaagagtggtcttcgcgtcaacacaccgccctgagatgaattagtgatgttttggctgcaccgcaacatacatttcgatatcccagtacccatcttccgcgccattgttcaagtaaacctcgaagcagggctttggtaacatttcataagcactgtcctgcaagaggctattaaagaactgataccagggtttagcaaaatcatcaccgactacacgagccaccgccaccgcatattgaccacctgaaatttctgtcagaatgacgccctcactgttttcggggagcgtaaagttattcggtaccgtcacgacggtgtcgcagcgtaatttttcggcgggtgtttcatccggattgtcgtaatagacagcaacccactccttcggcacaatatttttgctatctacccacatcatcaactgctcaaaacctttctttaccgtctgttcccacgggccaacgagatggaaacctgcaacggtacgtttatcttcctgcttaatctcgtagttcatgacgcctccattaacactgtttttatatacagtatagttgcaatattaaaaccacaaggaatgagtgttgattatgcgagcagactcgcactcctgccagtctgctgcaaaagaaaggtcaggccttatggtggaaataatcactcaggcgggaaaacatgccgccttccccgacagattccagggtaaccagcggccagtgcgccacctgtttatcacggtcgtaaagttcaatttcccctacccgctgatgggcgctaattggcgcggtgagctctttaccatcaagggtatatttggctttgatatgtggaatttcggctttcggtagcaccatccagaactcttgttccgttcccaggtcgatattttctttatcgccataccagatgcgttccgttccgacctttttcccacggtgcaaaatttgcaccgtagtaaagttttgttgcccccaacgcagtaattttcttgcctcttcctcacgaccttttgcactgtcagcccccattaccactgcaatgagacgacgctgcccatctacagccgaagcaatgagattaaacccggcaccagaagtatgacccgttttcaggccgtcaacattcatggttttatcccacaacaacccgttacggttttgctgggtgataccgttccaggtgagacttttctcactgtacatatgataaaactcgggctcgccgtggatgatagcgcgagaaagcacagctaaatcataagccgagctatgctggccaggtgcatccagaccatgcactgtttcaaaatgcgtatccttgagatgcagcttctcggcatagttgttcatcatttcaacaaactgccgttgcccaccggcaatatagtcagccagagcaacacaagcgtcatttccggaatccacaattaaaccacggcttaaatcacgtaccgatacgcgatcgccctctttcaaaaacatcagtgaagaaccgacaaacaccggattatctttcgcccacgcatcgcgccccacggtgacaatatcgtctggcgtaatgcgatgactatcgatagcgcgatccacgacataacccgtcatcagctttgtcaggctggcgggattgcgctgttgatgctcattaaccgcggtgaggatctgaccggtggtgtaatccatcaatacccaggacccggcatgaatctctggaggctgaggtgaaaaaggaatgttttccgccgcaaaaccagacgataagttaaaaacgaacaaagaagcagcaataataagacggcgtttcaacagcaaaccctcaggagtttcaaatagctgttctttttacggaaatacttatgaactggctggaataaagtgcaagaaaatgtgactaccctctcatttttatctgacatgatctgttgccactcgctgccaaattgtggcgctaaagctgattagcacggtgatatttgatactctggcagacagcagaaataacggatttaacctaatgatgaatgacggtaagcaacaatctacctttttgtttcacgattacgaaacctttggcacgcaccccgcgttagatcgccctgcacagttcgcagccattcgcaccgatagcgaattcaatgtcatcggcgaacccgaagtcttttactgcaagcccgctgatgactatttaccccagccaggagccgtattaattaccggtattaccccgcaggaagcacgggcgaaaggagaaaacgaagccgcgtttgccgcccgtattcactcgctttttaccgtaccgaagacctgtattctgggctacaacaatgtgcgtttcgacgacgaagtcacacgcaacgttttttatcgtaatttctacgatccttacgcctggagctggcagcatgataactcgcgctgggatttgctggatgttatgcgtgcctgttatgccctgcgcccggaaggaataaactggcctgaaaatgatgacggtctaccgagctttcgccttgagcatttaaccaaagcgaatggaattgaacatagcaacgcccacgatgcgatggctgatgtgtacgccactattgcgatggcgaaactggtaaaaacgcgtcagccacgtctgtttgattatctctttacccatcgtaataaacacaaactgatggcgttgattgatgttccgcagatgaaacccctggttcacgtttccggaatgtttggggcatggcgcggcaataccagctgggtggcaccgctggcgtggcatccagaaaatcgcaatgccgtaattatggtggatttggcaggagacatttcgccattactggaactggatagcgacacattgcgcgagcgtttatatactgcaaaagccgatcttggcgataacgccgccgttccggttaagctggtgcatatcaataaatgtccggtgctggcccaggcgaatacgctacgcccggaagatgccgaccgactgggaattaatcgtcagcattgcctcgataacctgaaaattctgcgtgaaaatccgcaagtgcgcgaaaaagtggtggcgatattcgcggaagccgaaccgtttacgccttcagataacgtggatgcacagctttataacggctttttcagtgacgcagatcgtgcagcaatgaaaattgtgctggaaaccgagccgcgtaatttaccggcactggatatcacttttgtcgataaacggattgaaaagctgttgttcaattatcgggcacgcaacttcccggggacgctggattatgccgagcagcaacgctggctggagcaccgccgccaggtcttcacgcccgagtttttacaaggttatgcagatgaattgcagatgctggcacaacaatatgccgataacaaagagaaagtggcgctgttaaaagcgctttggcagtacgcggaagagatcgtctaatttgaagcctccgccgctggtacggcggaggtcaatgttgagtcaggctttttgaacggtgatactccacgctgcatcgccaatctgctgataatcggtgatggcatgcccttcttctgccgcccactgtgggattgcttcagttgcctgggtgcaatcaaactcaattaccaactcatcgccgctggccatttctgccagtgctgcttttgcttctatgagtggaaacggacagacctgcgtcaccacatccagctttttaatcgccatctttacaccttacttaatttgccgcagcagtcgccagtcgcgccttacgctgcggtcgaacatacacaagccaggacgcagtccagactccgagaatcataaatacaaggccaatccagccctgccaggtcatcattgcagtcataaccagtccattaccgatagagcaaccacctgcaatactggcaccgaagcccatcagtacaccacctaacccgctacgtaatgttgtttgtgcatcagctgcgcgaacgcggaactcacggctcgctttggctgcaataaatgaccccacgaagatccctaacaccaggaaaacgccccagttaatgtatttcacgtcacccgcgaccagaaattgcagaatattggccgttggggaagtgattcctaacccaaacatgcgtccggttgcttcactcaggggccaggctaaaagcgcaatcaaaccgatgagtacagcagtgacaaagggatgccagcgtttttcaaacagaatatgagcgatcccggttcggcgcggcggtaaggtcgcgactttgagttttggcttcttcaactctttcatcaccacccagagcgttatcaccagcaaaacggcaaccaacggccacacagacaaattaaaagtctcagcaatagagttatgttcagtactgtagtgctgcaaggtttgatttaaaacactggcatgtggagaacgcatcaccgcactcatcaccatataagtgaaaagcgcgatccaactgccgatcaatccctcacccgcgcgataccaggtcccggtggcacatccacccgccagaacaattcccagcccgaagatatacccacctataacagtaccaagccacgggaacgccccggcttcgtaagtcagtaggcccgtctgaattaacgcaaaaacccccacactttgtaccgaaattgcaatcagcaaggcgtaaaacatgcgattatttttcgcgatatacatatcgcgaaaaccaccagtcaggcaaaaacgcccacgctgcatgacaaatcccagcagagcaccacaaattagcccgcttaatatcattgaaaacataaattaattaaccagatgaatgttaatgaggaaattattcatgactggtggaatgcagaccaataaccaaattctctaaattagaacaaatggttcttaatgaggatttcgataaaaaagaataaaaaaaccggagccaaatattcattcgactccggtttattattacaaaagatgattatgctacgtcttcgtactgcggaaccgggttacggaagctcttggtgacgcaagccaggtaaatcagaccgatagccgcccagatcagacccagaaccattgagctttcttccaggttaacccacagcgcaccaacggtcagcgcaccacacatcggcaggaacagatactggaagtgatctttcagcgtcttgttacgcttctcacggatccagaactgcgagatgaccgacaggttaacgaaggtgaacgccaccaacgcaccaaagttgatcagcgctgtagccattaccaggtcgaagttgattgccagcaaggcaatcgcgccaaccaggatgatgttcatcgccggagtacgccatttcgggtgtacataaccgaagaagcttttcgggaacacgccgtcacgacccattacgtacatcagacgcgctacgcctgcgtgcgccgccataccggacgccagtacggtaatggtggagaagatcagcgcaccaacctggaatgctttacctgcaacatacagcatgatttcaggctgtgacgcatccggatctttaaagcgagagatatccgggaagtacagctgcaggaagtaagttgcaaagatgaagatcatgccgccaatcagcgcggtcaggaaaatcgcacgcgggatcacgcgctctgcatctttggtttcttccgacaggttgctgatgccgtcaaagccggtaaaggagaagcacaggattgtcgccccggtaatcatcgggataacatgtgcatcgccagaccagaacggacgagtgctcgccagcgtaccagcgccttcaccttcaaatacgccataaacaaccatgcccagaatcaccgcgatcagcactacctgcaacacgacgattacagtgttgaagttcgctacggatttcagactacgcaggttaaaggcggtcataaaggccaccagcgccaccacaaacatccacgatgggatggaaggcaccagagcttcaaaatagattttcgccagcagaatgttgatcatcggcgcgaacagatagtcgagcagagaagaccaacccaccataaagccgacagtcgggctaatggatttctgggcgtaagtatatgcagagccagcagaaggatagcggcgaaccagcttcccgtagctcagagccgtaaacaggatcgcaatcaatgcgaacgcataggctgtcggcacatgaccatccgtgaggcctgaaacgataccaaaagtatcaaacagcgtcatcggctgcatataggcaagacccatcattacaaccggaactaacgtaagcgttttacgcaattccacgcgagaggtgtttggagtaacgttatgcgacatggtcattctcctttacggtgataaccgtcgcgtaagcaaaaaattgccccatttttttggattcctcagcgacaacaactgtcgatttttagtaaatatctatccggtacgaagcccggcctcttggtatgaatgattggtttgaagcaaaaaataaccgacgctgatgaaacgtcggtttttagtcattttttgacagcggcgcattgtgcctaaatgggggggaaatgacaagagaatgagaggcttgtcataataatttttctttaaatggctgattttccgtcatcagattttgcataaacaccggcgatcgcactatttgctaaaatttcatcccgccaccagccactggcaagtcctgcggtctgttcattccagccaatccagacgggttcaaagagagtttgggcgaccactttcttctcgattaacgcgccactatcgagaaaacgttgcgccagataacggggtaaatagccgcagccgaggccgctaatttgcagctccagcttggttttaaaatcgaaaacggtaatggcttcttgttcgtcgagaagttgtgaggccgtagaagcgcctgcctgcgcagtatcccccaccacaatcgcccgatatcgcttaataatacgacgatttaacggctcttcttccagggctaacggatgatgaggcgcgaccgcaaagacttgttccagatcgcccaaccgtgaaaaaccaaactcactggaagatggtggctcatgcatcgcgccaacaataatatccgctcgcccctgagtcagggcatcccatgaaccaccgagtacgccattgataaacttcaggcgcgtcacgctatgatgttgataaaaagcttcaatcagtggcgcaagcagagaaaaaggaaacgtgtcgtccacgccaatcaccagctcgttttcccagccttcatgcagtttgatcgcctgcttttccagttcccgcacggtatgcagaacttcccgccctttctctaataacatttttccggtgcgggtgaatttagcgcggtgaccgctacgatcaagcaattgaatattaaggtcgctttccagcttgtgaacggtgtaactcagagcggacggcgtcttgtagagtttggccgacgccgccgcaaaactgccttctttttctaaggcatcgaggatcatcaacacatccagcagtggtttcatacacgcccccttgcagtgtatgcggcgtcctgctggcgtgatcgtttactccagcggcattaccagcggatcgggatactggtattcaaatcccagttcattacaaatccgactgccatcaataatcttacctttgccgctgtccagactatttctgaactgcggaggttccagccccagtaaacgggccatctgcggatagaaaacattacgcgcagggtgagctggcgcacatatattatagatgtgtccgcctttaggtgcctgtaacaacagagtgatagcgccaataacatcttctaaatggactaaattaacaccatgttcaccatcaggcgcggtttttccggcaaagaagcgtccgggatgacgtcccggtccgacaagacccgcaagacgcagaatatcgaccgaagtaccgggtaaattgtgcagccagtcttcgagttcttctaatactcgtccactgttggttaccggattacgcggggtggtttctttcaccgtgccttgcgcgtcgccatagacagatgttgagctggtaaaaataattcggggaatacgatggaccagcgcgctatccactaactcttgtaccgcttgtaaatagaactcatcgccggagccgctacgacgtgccggaagcgtaatgaccagtgcatcggcatccatcagggcatccagatcgtcagaatcgcaaactaactcaggctccatgcgaagcagatagctatcaatgccactcattcgggccgcttcgacaccatcttgtgtggttttactcccggtgacttgccagcctcgcgctgaaagtgacatcgccagcggcatgcctaaccaccctaacccgacaattgcgacctttttcatccgttatctcctgatacaccttagatctataaggctacgctagcgtatcaaaactgacaattcattctatgaatgaaatcgaaactgttagcaaatataccattgcctgatgcgctccgcttatcagtcctacaaaaacatcaatatattgaatttaggcaacgtttgtagacctgataaggcattcacgccgcatccggcaggaacaaagcccactttagttacagaacacaatgttcttgagggttttaaagacatattttcacgattacttttctaacgtagtcactccaggcccctcctttccccgctcattcattaaacaaatccatcgccataaaatatataaaaaagcccttgctttctaacgtgaaagtggtttaggttaaaagacatcagttgaataaacattcacagagacttttatgatacgcgttcaatttaaacaccaccatcatcaccatcatcctgactagtctttcaggcgatgtgtgctggaagacattcagatcttccagtggtgcatgaacgcatgagaaagcccccggaagatcaccttccgggggcttttttattgcgcgattgataacggttcagacaggtttaaagaggaataagaaaatgacagacaacactcgtttacgcatagctatgcagaaatccggccgtttaagtgatgactcacgtgaattgctggcgcgctgtggcattaaaatcaatcttcacacccagcgcctgatcgcgatggcagaaaacatgccgattgatattctgcgcgtgcgtgacgacgacattcccggtctggtaatggatggcgtggtagaccttgggattatcggcgaaaacgtgctggaagaagaactgcttaaccgccgcgcccagggtgaagatccgcgctactttaccctgcgtcgtctggatttcggcggctgccgactttcactggcaacgccggttgatgaagcctgggacggcccgctctccttaaacggtaaacgtatcgccacctcttatcctcacctgctcaagcgttatctcgaccagaaaggcatctcttttaaatcctgcttactgaacggttctgttgaagtcgccccgcgtgccggactggcggatgcgatttgcgatctggtttccaccggtgccacgctggaagctaacggcctgcgcgaagtcgaagttatctatcgctcgaaagcctgcctgatccagcgcgatggcgaaatggaagaatctaaacagcaactgatcgacaagctgctgacccgtattcagggtgtgatccaggcgcgcgaatcaaaatacatcatgatgcacgcaccgaccgaacgtctggatgaagtcatcgccctgctgccaggtgccgaacgcccaaccattctgccgctggcgggtgaccaacaacgcgtagcgatgcacatggtcagcagtgaaaccctgttctgggaaacgatggaaaaactgaaagcgctgggtgccagttcaatcctggtcctgccgattgagaagatgatggagtgatcgccatgagctttaacacaatcattgactggaatagctgtactgcggagcaacaacgccagctgttaatgcgcccggcgatctccgcttctgaaagcattacccgcacggttaacgatattctcgataacgtgaaagcacgcggtgatgacgccctgcgggaatacagcgcgaagtttgataaaaccacggttaccgcactgaaggtgtctgctgaggagatcgccgccgccagcgaacgcctgagcgacgagctaaaacaggcgatggcggtggcagtaaaaaatattgaaaccttccacactgcgcaaaaactgccgccggtagatgtagaaacgcagccaggcgtgcgttgccagcaggtcacgcgcccggtcgcttcagttgggttgtatattcctggcggctccgccccgctcttctcaacggtattaatgctggcaactccggcgcgtattgcgggctgtaaaaaagtggtgctgtgctcaccgccgccgattgctgatgagatcctttatgcggcgcagctgtgcggtgtacaggacgtgtttaacgtcggcggcgcacaggccattgccgcactggcgtttggtactgaatctgtgccgaaagtggacaaaatcttcgggccgggtaacgcctttgtcaccgaggcaaaacgccaggtgagccagcgtctggacggtgcggcgatcgatatgcccgcaggcccgtcggaagtgctggtgattgctgacagcggcgctacgccggatttcgtggcttctgatttgctttcccaggctgaacacggcccggactcacaggtgattttactgacgcccgatgctgatatggcgcgtcgcgttgccgaagctgtcgaacgccagctggcagaactgccgcgtgccgaaaccgcacgtcaggcactaaacgccagccgcctgatcgtgactaaagatttagcgcagtgcgtagagatctccaaccagtacggcccggagcacctgatcatacagacccgcaacgcccgtgaactggtcgatagcatcaccagcgccggttcggtatttcttggtgactggtcaccggaatcggcaggtgattacgcctccggcaccaaccacgttctgccgacttacggttacaccgccacctgttccagcctcgggctggcagatttccagaagcgcatgaccgtgcaggaactgtcgaaagaaggtttctccgcgctggcttcgaccattgaaacattggccgccgccgagcgcctgactgcccacaaaaatgccgttgctttgcgtgttaacgcccttaaggagcaagcatgagcaccgtgactattaccgatttagcgcgtgaaaacgtccgcaacctgacgccgtatcagtcggcgcgtcgtctgggcggtaatggcgacgtctggctgaacgccaacgaatatcccacagccgtggagtttcagcttactcagcaaacgctcaaccgctacccggaatgtcagccgaaagcggtgattgaaaattacgcgcaatatgcaggcgtaaaaccggaacaggtgctggtcagccgtggcgcggacgaaggtattgaactgctgatccgcgctttttgcgaaccgggtaaagactccatcctctactgcccaccaacgtacggcatgtacagcgtcagcgccgaaacgattggcgtcgagtgccgcacagtgccgacgctggacaactggcaactggacttacagggcatttccgacaagctggacggcgtaaaagtggtctatgtttgcagccccaacaacccgaccgggcaactgatcaatccgcaggattttcgcaccctgctggagttaacccgcggtaaagcgattgtggttgccgatgaagcctatatcgagttttgcccgcaggcatcgctggctggctggctggcggaatatccgcacctggctattttacgcacactgtcgaaagcttttgctctggcggggcttcgttgcgggtttacgctggcaaacgaagaagtcatcaacctgctgatgaaagtgatcgccccctacccgctctcgacgccggttgccgacattgcggcccaggcgttaagcccgcagggaatcgtcgctatgcgcgaacgggtagcgcaaattattgcagaacgcgaatacctgattgccgcactgaaagagatcccctgcgtagagcaggtttttgactctgaaaccaactacattctggcgcgctttaaagcctccagtgcagtgtttaaatctttgtgggatcagggcattatcttacgtgatcagaataaacaaccctctttaagcggctgcctgcgaattaccgtcggaacccgtgaagaaagccagcgcgtcattgacgccttacgtgcggagcaagtttgatgagtcagaagtatctttttatcgatcgcgatggaaccctgattagcgaaccgccgagtgattttcaggtggaccgttttgataaactcgcctttgaaccgggcgtgatcccggagctgctgaagctgctaaaagcgggctacaagctggtgatgatcactaatcaggatggtctgggaacacaaagtttcctgcaggcggattttgatggcccgcacaacctgatgatgcagatcttcacctcgcaaggcgtgcagtttgatgaagtgctgatttgtccgcacctgcccgccgatgagtgcgactgccgtaagccgaaagtaaaactggtggaacgttatctggctgagcaagcgatggatcgcgctaacagttatgtgattggcgatcgcgcgaccgacattcaactggcggaaaacatgggtattaatggtttacgctacgaccgcgaaaccctgaactggccgatgattggcgagcaactcactaaacgagaccgttacgcccatgtagtgcgcaacaccaaagagacgcaaattgacgtccaggtgtggctggatcgcgaaggtggcagcaagattaacaccggcgttggcttctttgatcacatgctggatcagatcgccacccacggcggtttccgtatggaaatcaacgtcaaaggcgacctctatatcgacgatcaccacaccgtcgaagataccggcctggcgctgggtgaagcgttaaaaattgcccttggcgacaaacgcggtatttgccgctttggttttgtgctaccgatggacgaatgccttgcccgctgtgcactggatatctctggtcgcccgcacctggaatataaagccgaatttacctaccagcgcgtcggcgatctcagcaccgagatgatcgagcacttcttccgttcgctgtcttacaccatgggcgtgacgctacacctgaaaaccaaaggtaaaaacgatcaccaccgtgtagagagcctgttcaaagcctttggtcgcaccctgcgccaggccatccgcgtggaaggcgacaccctgccctcgtcgaaaggagtgctgtgatgaacgtggtgatcctggataccggctgcgccaacctgaactcggtgaagtctgccattgcgcgccacggttatgaacccaaagtcagccgtgacccggacgtcgtgttgctggccgataaactatttttacccggcgtaggcaccgcacaagcagcgatggatcaggtgcgtgagcgcgaactgtttgatctcatcaaagcctgtacccaaccggtgctgggcatctgcttagggatgcaactgcttgggcggcgcagcgaagagagcaacggcgtcgacttgctgggcatcatcgacgaagacgtgccgaaaatgaccgactttggtctgcccctgccgcatatgggctggaaccgcgtttacccgcaggcaggcaaccgcctgtttcaggggattgaagatggcgcgtacttttactttgttcacagctacgcaatgccagtcaatccgtggaccatcgcccagtgtaattacggcgaaccgttcaccgcggcggtacaaaaagataacttctacggcgtgcagtttcacccggagcgttctggtgccgctggcgctaagttgctgaaaaacttcctggagatgtgatgattattccggcattagatttaatcgacggcaccgtggtgcgtctccatcagggcgattacggcaaacagcgcgattacggtaacgacccgctgccgcgattgcaggattacgccgcgcagggtgccgaagtgttgcatctggtggatctgaccggggcaaaagatccggctaaacgtcaaatcccgctgattaaaaccctggtggcgggcgttaacgttccggtgcaggttggcggcggcgtgcgtagcgaagatgacgtggcggcgttactggaagcgggcgttgcgcgcgtggtggtcggctccaccgcggtgaaatcaccagaaatggtgaaaggctggtttgaacgtttcggtgccgatgcaatagtgctggcgctggatgtccgtattgatgagcaaggcaacaagcaggtggcggtgagcggctggcaagagaactcgggcgtttcactggaacaactggtggaaacctatctgcccgtcggcctgaaacatgtgctgtgtaccgatatctcgcgcgacggcacgctggcaggttctaacgtctctttatatgaagaagtgtgcgccagatatccgcaggtggcatttcagtcctccggcggtattggcgacattgatgatgtcgctgccctgcgtggtactggcgtgcgcggcgtaatagttggtcgtgcattactggaaggtaaattcaccgtgaaggaggccatcgcatgctggcaaaacgcataatcccatgtctcgacgttcgtgatggtcaggtggtgaaaggcgtacagtttcgcaaccatgaaatcattggcgatatcgtgccgctggcaaaacgctacgccgaagaaggtgcagacgaactggtgttctacgatatcaccgcttccagcgatggccgtgtggtagataaaagctgggtatctcgcgtggcggaagtgatcgacattccgttttgtgtggcgggtgggattaagtctctggaagatgccgcgaaaattctttcctttggcgcggataaaatttccatcaactcccctgcgctggcggatccgacgttaattactcgcctggcggatcgctttggcgtgcagtgtattgtggtcggtattgatacctggtacgacgctgaaaccggtaaatatcatgtgaatcaatataccggcgacgaaagccgcacccgcgtcactcagtgggaaacgctcgactgggtagaggaagtgcaaaaacgcggtgccggagaaatcgtcctcaacatgatgaatcaggacggcgtgcgtaacggttacgacctcgagcagctgaaaaaagtgcgtgaagtttgccacgtcccgctgattgcctccggtggcgcggggaccatggaacacttcctcgaagccttccgcgatgccgacgttgacggcgcgctggcagcttccgtattccacaaacaaataatcaatattggtgaattaaaagcgtacctggcaacacagggcgtggagatcaggatatgttaacagaacaacaacgtcgcgaactggactgggaaaaaaccgacggactgatgccggtgattgtgcaacacgcggtatccggcgaagtgttaatgctgggctatatgaacccggaagccttagacaaaaccatcgaaagcggcaaagtcaccttcttctcgcgcactaaacagcgactgtggaccaaaggcgaaacgtcgggcaatttcctcaacgtagtaaatattgcgccggactgcgacaaagacacgctactggtactggcgaatcctatcggaccaacctgccacaaaggcaccagcagctgcttcggcgacaccgctcaccaatggctgttcctgtatcaactggaacaactgctcgccgaacgcaaatctgccgacccggaaacctcttacaccgccaaactgtatgccagcggcaccaaacgcattgcacagaaagtgggcgaagaaggcgtggaaaccgcactagcagcaacggtacatgaccgctttgaactcaccaacgaggcgtctgacttgatgtatcacctgctggtgctgttgcaggatcaggatctggatttaacaacggtgattgagaacctgcgtaaacgtcatcagtgagttgcggggtaagcggatgcgatgttgttgtcgcatccggcaaaaaaaaacgggcaaggtgtcaccaccctgcccgttttctttaaagctgcaaagattacttcgcgttgtaattacgcagagcgttacgccccagcacaatccccgcgccaaccatgccgcccagcagtaccgccagaatcaaggtaattgcctttttcgggctatcgcgacgaataggtaacgtcggtttcattacatagcggtaagcatgaatatcaagtttatcaacgtcaagattgtcgatatccagcaggttttgacgagtctgatagtagtttgatgagaacaccaacggacgagtcgcctcgtgcttaatcatcgactccagcgcttcgctccccaaaaggaacatagtatcctgggttacgtcctgtgtctgctgaatctgtggctttgtcacctgcgcctgattcgcatactgcaacgcttcctgaatctgacggatacgcagatctttctgctcttgagcgactacttcctgggtcttcagagaatcctgcaagtttttcatttgcagcgcgatgttgtctttcaggtcttgttccagttcttcatttacctggtcgtcaacttgctggatatacttcgccagctgtttctgcgcaccttcaggtgtttcacccacataagaaaccgctaaaggtaatgactgatttttaacggtaggctcaatggtcagtttttcaggttcttcctgattatccagcgtttctgctaatgcagaaaatgtcgtgctgaaacgaccaattaacatcgactggatctcagacactttcggcgctgccgaaccataaatcacatttatggcattgttataaccagcgatttgccccacatcaggttgagtaacgatagctgtggaagtccacttttctttggcaacggccagataccctatagccagggcaatagccacaatgacagagatgataattgtcatcttgccacgccacaactgcaccagtaaatcaatcaaatcaatctgttccgggtcatggttttgcccagaaacattattattttctactctcatcattaccctaacggacgaaataattttaagtcgccatagtttagcgataatcgccatgaatgctataggataaatgataaaaataatgaattattacaaagggaacataagagaatcagggcgaaaatcgccctgataacaggatgttagtcgctgccaaaaagatcgcgggtgtagactttgtctgccacatccttaagctcttctgccatacggttggagataatgacgtcggcttgttgtttgaaggtggcgagatcacgttccaggcgagagttgaagaatgagtcttctttcattaccggttcgtaaatgattacttcaacgcctttcgccttgatacgcttcataatcccctgaatggaagacgcacggaagttatctgacccgctcttcataatcagacgataaatacccaccacttgcggtttgcgtgacaaaatggcatcggcaataaagtctttacgcgtgcggtttgcatcgacaattgccgagatcaggttattcggcactgactggtagttcgccagtaactgcttggtatctttcggcagacaataaccaccataaccaaacgacggattgttgtaatggttgccaatacgcggatcgagacaaacgccttcgataatctggcgagtattcagccctaaactttctgcatagctatccagttcattaaagtatgctacgcgcatcgccagataagtattagcgaaaagtttaatcgcttctgcttcggttgaatcggtaaacagggtcgggatattttgcttaatcgctccttcctgtaacaacgcagcaaaacgttctgcgcgttctgaacgctcacctatgacaatacgtgacggatggagattatcgtaaagggctttaccttcacggagaaattccggagagaaaataaggttatcgatacccagacgttctttaattgatttggtgaaacctaccggaatcgtagatttaatcaccattaccgcgttgggattaatttctgtcacatcacggatgaccgcttccacgcttgaggtattaaaataatttgttttcggatcataatcggtaggtgtggcaataataacgtaatcggcatttttatacgcgtcatacttatctgtcgtagcgcggaaattgagatctttagtcgccagatactcttcaatctccttatcaacaatcggtgactgcttcttgttaagcatgtccactttggcctgaacgatatccagtgcaaccacttcgtgattttgcgcaatcagaataccatttgaaagaccaacataacctgttcctgaaattgttattttcattagctctgacttcttccggttaaacatttagagtggtcattaatccaccaccacaacttcatctactgcgggatttttaacgctgatgtagatgaactgtcaaggcagcgatcctgctgtgcggcgctgtattatatcgcgtttttaactataaattataaaaaaaggccataacctgccgctttgtataataaaaaagcccggagggtttctccgggccttgcattgattaattgatttaaatcagattaatccagccattcggtatggaacacaccttctttatcaatgcgcttataagtatgcgcaccgaaatagtcacgctgtgcctggatcaggttcgcaggcagaacagcggcgcggtagctgtcataataggcaaccgcagcggcgaaggtcggaaccgggataccgttctgtaccgcataagcgacgacatcgcgcagcgcctgttggtagtcatcggcaatttgcttgaagtacggagccagcagcaggttagcgatctgcggattttcggcataggcatcggtgattttctgcaggaactgcgcacggatgatgcagccagcacggaaaatcttcgcgatttcgccgtagttcagatcccagttgtactcttcagacgcagcacgcagctgagagaagccttgggcgtaagaaacgattttgcccagatacagagcacgacgaactttttcgatgaactcagccttgtcgccagctggctgcgcttgcgggccagagagaactttagacgcggcaacacgctgatctttcagagaagagatataacgtgcaaacacagactcggtaatcagcgacagcggttcgccgagatccagcgcgctctggctggtccatttaccggtacctttgtttgctgcttcatccagaatcacatcaaccaggtagttaccgtcttcatcttttttggtgaagatgtctttggtgatgtcgatcaggtagctgctcagttcaccgttattccactcggtaaaggtctgcgccagttctacgttggtgaggttcagaccacctttaagcagagaataggcttcagcaatcagctgcatatcgccgtattcaataccgttgtgaaccatcttcacatagtgacctgcaccatcggcaccaatataggtaacgcatggctcaccgtcttcagccactgcggcgattttgttcaggatcggtgcaaccagttcataggcttctttctgcccaccaggcataatggaaggacctttcagcgcaccttcttcaccgccggaaacaccggtaccaatgaagttaaagccatctgcagaaagctcacggttacgacggatggtgtcctggaagaaggtgttaccaccatcaatgatgatgtcgcctttatcgaggtatggcttgagagaatcaatagcagcatccgtgcctgcacctgctttcaccattaacaggatgcgacgaggcgtttccagagattcaacaaactctttcaccgtataataaggaaccagtttcttgcctggattttcggcaatcacttcttccgtcttttcacgggaacggttgaaaatagagacggtataaccacggctttcgatgttgagcgcaaggttgcgccccatcactgccataccgacgacgccgatctgttgctttgacattgtttactcctgtcagggaaattagccacgaggggcagttatgcgatgaattctgttaaatgggattaagctatatactcgaaattttctttaaaaaagaaaataacacaatacattaaactaaaagtacaatgaccttatataatcagctatttccttgcctttgtcgaactcaatcttgtaatacggattaggtttaaaattatgaatagattttaacaaatcacctatctcattgtaatcccaacaaactaacaaataatgattacgctccatataagtagctatatcgacttggtgtttatctatacgttcaagattaggaaccgctataattttcttccctttttctaagagctgatatagtgtcccagccccggcatgggtaattattacatccgcgtcattatagaaaacgtcaacatcatccctaaaagaaaaaaaagcaccacttttgggtatataattaccatttgcgatttgaaaattaacattgtactttttattctcattaaagtaatgatcgaaattttcaatcatagaatcaaatgaggtcgtccctacagtaacaaaaattctcataacctacctgaataaattgctttaggatataattttaagagtgacttattttgaatataaaatttattagacaatcgatacattattcttccggataaagagtatgttgtaaatctcgaccaagtttcaatataaattacttttgtgccaactaatttcgctgccagcgttgctgcaatcgcaattcctggtccagttgtaacgataaccttaatattctttttgcgtagaatagaatatgtttgtttgaaaattattaggggacctatgtttttcaataaagataaccaactatatttatctctaaattctatagttttattatgccagcaggaccaatgagggtactttgtagagtcagataaagttattgcttcaaaatcctcgaggttgttaagtattataggagcaagtcgattcatttgagcagcatgcccaccttcaccataaacaaataatatatgttttttatttaaagacatttattaatatccttttaacatttgactcaccgtaaacttcattaactatatcgctatttctttttaatattttatttaaatagacaacattaattttttgaaaattttcaatttctctagctatagattgagagtcatagttttcaataaaagagaatgttaaaccatgttgtctaatttcatagaatgctgggatttttgataatatacaataaacaccagatgacatagcttctaatggtactaaacccaaactttcactttcggaaggataaactaacacattaatggttttgtaccaccttgctaattcattatgattcatggggcctagaaattcaatatcgcaatccttagctaatttattaagataatctttttgctcaccatcaccgacaatgcttaattgtacgttttttaattgtttaatggcatttattataagatctacgttttttgatttaaccaatctacctgcaaatccaatttttacagattcatcatgtacgggaaaggaggtttcatatttgaaacattttttaacaccaccagaaggataaataataactttacttatattaacactatagttttcacataaatatttagcatattgttgagagggacataatattgataagctatgtttaaacaatgttacggtaaatacattttttatcttatggaatataaaacttcttccgttgaggtgttttacatccccaccatgcacatgactgattacacgtaatcttctgcccaaaaaaatcgcacaaataacaggaagcgatatatgagaaacataatggcaatatatatagtcatattttttgaagttcaaataaaggaacgctcgtatataaaaaaacatataacttaagagtttagatattcggccattgcatttccttttcctgacacagagctcaacatcatagccaatatcagataactgatttgcaattgtttcaacaaatattccaaaactcggttccttttcggaaggatacatattgctcaataataaaattttcatccttactcctttgtataatttttgtatttcggatgaaagttagtaataattcgccctaataaattaacaaatggaatgaatattggtttcatagatggactgtatgcaccctcagatttcattgttctataaaatgcattctcatctttccatatgtcatagaaaactttgtacgttaaaacatcattagctttttgtttaattagataattaaatatatttctcgatgcaaaaactgggaaaacactcttaaaacatgaattcattactatagcccctgtagtaatatatcgaagacctcgaccatataaaaactcgtagtacgttattttttgcaatgaatcaatacattctactttagaaaccttttttaaaaaatcagcatatacataatcaaattgtttggcattgagttttctatatcgtttcctcagtaacattttcgcatcgataaaagatgatgtaattgatggaaataatttataaaattctccttttttaccaccaaaagtcatatagacaccacgctgtagcacatctccaaggtatccatctaacgctattgtattacttttggataaattatgtacgtaattatagttagcaaaaaattgtgtgttataagactttacgcttcctttgaataataattcacatatcctctcatcactttccgttactttattaactcgaaaaccaaatgagtgataaggtatttttttatgcgctgcaagagtcttcccgtttcttacatctgcagaaccatttggcccccatgtgtaagcaaattctggttctgatacaattaatagtaagcgagaatcaaatcctgcagatattgcaatggattgcatcgatttatgtgttgttaaaattaactttttggcttcattaataacatcaaatggtaattcagtattcatgacttcataaccattttcgtaaacacccaacttaccatcagtacaagtaataacatcacctggtaatgtgcgataaacattcttatatattgtatatttaccaaacaaatgaccttgagcgtttaaaatatcattaagctcatgatcaatctcatttgtaaatacacatggtgatggggataaagatagtttattatcttttatataataataatgaggtgaaagtgcaaatggatctgtaaaaacagacatttccccttttgtttcatagatacaaataaacaccccagcaataatacgcttttgtacatcgctaatattattttttgaatccagaacttctttcagccatactatattattcctttcataattttcatttataaaccaaccagaaacatagatactgcttttttcagatttgattacaggataatgatgccaatcgtttggatcgaaataaatactaaccgaattaccaaatattacgtcggtaataagttttttattcttgcttaatacatgatttaattcacttggtagttctgtatttattgttacaaaagacattttccaacctcatttaaaaccttattaataatataatatcgaatcgaatacgatataaaaacaatagagcataataaaaacatagttagtgtcgtattttgaaagtctattatctttaatatgtagtaaactccaacaaaaaagatgaaacttaatgaattcaatattaacgaaatattttctttcccaaccaaattaattagtgttgtttcaagaatagtatactgccccataaatataaaaagagataaactcaaaccaatataaatgatatctactatagatgatgttttatttgtcaaacatccatatgcaatcataataataacacctaacagcattacacatgccacccgatttttaaacctagcagattcttttaaaaattcgcctcggtcattattatataaactctgaatatctacaattttcatattcaacatagcacgcgggaataccgtaataattccagcggttgtgatcattagtgaaactgctttagttattaccggaccaactagtgataaactggcgataggaagaaaataaagtatacctgaagaaactaaatttgaatgaccaataataaaagcctctctaaattttatagtttttccattatcaacaaaacagaaaaatgctgtaagtaaagattgaataatatataaaaaaccaagcagtataattatatttatatctttgataaataaaaaaacaaatgggggaagaataaaaatcacttcattaattgcgccaatcaaaaaattttttttaactattatcatataacgtatgatttgattcattgtcaaaccaattgacattaataacaaccctattatgcctaaccttgtaacttcccaaaaagaaaaaatgataatccctccggcaatactacttataataatagctatgaatgcaattttaatgaaattaacaattccgaattcagaaccatacttgattattacagttccgacccccaccccaccaatcatagacattactatagcataagaatacgcagaggaaaaaaaagcaaaatactctgttgttgttacatgtgatattatataaaaaagtactaccctattagcccccggtaataccgtaaatgccaaaacagataatttcaaaatatatgagattatttttcctttctgtttaaaattcattttttctcgccaatgacttataaattattgtaagatttttataaataaacatgactataaaaaactttatcaaaatatagcaaaatacttcaaatccatctctgacccaaaaaaataagtacccaacactacttagtaatattattttccaatagagattggatgagtgagaaaatgatctatcaaaaataaacaatataaccccactaatgaatccacctacccaatagaaccaactaccaaacattattaaggatgttcctaaaaaagttggcgacatagttaaattagtgtctaaagatagaatttcagtagtataaaaatatccattgtttaaaacatttatcggtttatcttcccatagaaaccttgggatgataatagaaaactcattaaaaaaagttgacaggtattgaggttcaattaatctcttatctagtgcttcattaatatttatcacagcatgcattggtgaaaaagattcgaatgcaaataatattacttgcattcctccattcataataaaatttatagcatcagtaatattatttgcataacgatatagttctaatatcattaatgtgaacacaccacaaacgataatcaatgccaaaaacttctttgtgatatgtttgaaatatagagccaagtagataagtgaaaatataccagctgctagaacatttctggaaccacctatcacaacataataaatcaaaccgcaaaacacacttaataataaacatataattaagctgatcttagagggttttgatatataaataaggattaatgctggtatgtatgcatacattaatattatagataatccaccacctgtgttggctgttaatcggtcgttatatgataatcctagtgcaattccattttgtagtacgtaagataaaacacctaagaaatataacatcagtaataaaacatacccagaaccaattatcacgccatttaatataggttcacgtattttaaaaatagaggacaatgtcctataagtaataataattaacattagcaaaattgttgtttgcaggaaagaaagcccctcatctgaatccagttcaatatgataaaatccatctttagttaaaaaataaaaataatggcagaccacatagaaaaaaataaaacaagagtaataaatcccatacctgttatatttcctgcctactaacgcaataaataatacgaataaaaccagtaaagttagcattgtttactctcaaagtaatcgcactcaattaaaatagcatttctatggcttctcaattattataacaccataaatcttaatcaatgaagacttctcatattaataagccaacacatataattgatatttaatatcttaagtagagttaggagccttataattggtcacatcgaaaatatcattatttataacatacgctaccgcccctggctttacagctaccagagcactgcatgcatgcctgcgatgtagcgagcgttacccacccgcgctaaacccgaaaaattcaaacgctaattgtcttaccaatccgctctggaaacaaggaaaatcctggaaaactttgactaaaatcctattgctaactcgttgttattctgattgtttatataaaacaacggcaggaaaattcgcaacaaattactttcgccacgaatcttcactgccgttataattttcttatcaaccgttacattcggtcagattttaattattcgcttaacagcttctcaatccctttacggaacttcgccccttctttcaggttgcgtagtccatacttcacaaatgcctgcatataacccatttttttaccgcagtcgtagctgtcacctgtcatcagcatggcatcaacggactgttttttcgccagttcagcgatggcatcagtcaactgaatacgcccccatgcacctggctgcgtgcgttcaagttccggccaaatatcggcagaaagcacatagcgaccaacggccatgatgtctgagtccaacgtctgcggctgatccggtttttcgataaattcaacaatgcggctgactttaccttcacggtccagtggttctttggtctggatgaccgagtattcagagaggtcacccggcatacgttttgccagcacctggctacgacccgtttcgttgaatcgtgcaatcattgcagcaaggttgtagcgcagcgggtcggcgctggcgtcgtcgatcacaacgtctggcagcaccacgacaaatggattgtcaccaatggcgggtcgtgcacataaaatggagtggcccaaacctaaaggttcgccctgacgcacgttcataattgtcacgcccggcgggcaaatggactgtacttccgcaagcagttgacgcttcacgcgctgctcaaggagagattctaattcataagaggtgtcgaagtggttttcgaccgcgttcttggacgcgtgagttaccaggaggatttctttgatccctgcagccacaatctcgtcaacaatgtactgaatcattggcttgtcgacgatcggtagcatctctttgggaatcgccttagtggcaggcaacatatgcatcccaagacccgctacaggaataactgcttttaaattcgtcattatttcatccacctgtaaaatggttgctgaattatagcttgttcgatttttttcgccagcatcaattaccctgaattgattactgaattacttgtgatgttacgccgcttcgttgtggattgcagtagcattgttcctaagtatggctccatttttccaggaatggtcgcaaatctactctctccgttccggcaatctaaagttaatcttttccacattaacaatatggtgattaatcctgtcgatatcgacggagctttgccctctttcattcaccgcatgaacatttgcaagagacagcagtgtttcttttttcgccataaagacgccgcgaacgtctttatgcatgtcgaagttcatgctcaatgctggtccaactgaggattcctgcatcaccttgatattacgcataaaaagatgttgcggtttgttgtgtaactccagcgatgcacgcttcatctcaatgttagtcagtgccacaaaggagacagcattcccggcggagatttggataccgcgcaatttgtaagcaaggtgggtgttatccagttgaatattattcactcggaaattttgcggtatcgagagatatttgcctttaattaccccatagccgattaacatcccggcgctattaatcatttcaatattatcaatcacgaaattgtcacaaccgtatatagcgactgtcgcgttatcaatacctgctttcttactgaaatccggcgtgatattgcgggctttgatattacgaataacaaaatgtttaccattttcaacatggatcaactgccgacaatccgatcccgtgatattcgccacaacaaagtttttcactgcctggtcttccgggtagttgttatcataagtgcttcccgcaagacctatgccaatgccccagttgattttgccgttagtacagttgatgcgctcgatgacatggtcagatatcaaaatatcacggtcgttaattgccacgttccattcaatggcatcgccctgtaagtcgctgaacttacaattggtgatgttggcaccgataatctggttatgaaatccctggcgtaagatggcgtaattagcgtggctaacggtcaggttatcgatgatcaggttgcgcatgacccgtttgtttttgccgccgatataaatctgcgttaccggaccaaagccgctcatcgccagccctttgatggtgcagtcagagccacgcacatccagggtgatgttatgcatactgccgccctcctcccctgtcacctggctgccgtcctgtaagacaaaacgccctctgccgttaccgcgcaggcttcccaggatgtgtaacgttttaccgggagggataaagatgccggtgttgatattgtcacaaacgaatccggcaggcacgacgactgtttgtccttcgctgaaggcttgtttaaatgaggcgatccagtcgtgtggattgtagtcgttaatgttaacgctttgtcgggcgggaagtgcgcgagcgaaaggggtatggaggaaggcaagcgccgagcttgccgtcaggaacgtgcgtcgggagagttttttaaatggcatacgttctcctctataaagcttgcagcaagctggcgagttctcgattaatcacctgctggttaaaatcgtgttcgactttttcgcgcgcgcgttggataaccggagccagttcgtcggtgtccagttggctaaacgccgccagtcgttgcgccagtgcgcgagcatcgttctcaggcaccagccagccggatttgtcagcctccaccagttccggtattccactatgcagagtagaaaccaccggaatgccgaccgccatcgcttccattagcgccaccggaataccttccatatcaccatccgcacctgtaaccgatggcaacaggaagacatccgcgtcgtcgagcatcgctttcacttcatggctcggtttaaagcccggcatctccaccacatcttccagttgatattgttcgatgagggtgcgcaggcgtcgttcccacgggccaatgccgagaatgcgatagcgaaatgccacgccctgctctttcaactgacggcaggcttcaatcgccacatgcaggccttttttctcggttaagcgtgcgacggaaataatttccagcggcgttgcgggcgctgtcaccggacgcgggctaaagcgcgtcatgtccacgcccatgcgcgatacggcgattttttccctcgggcagcccattttttgcagccttccggcccacagatcgcttatcggtagcatcaggtcgccacgtcgaaacagttgttgatattcgggagtgtaatggttgagcacttcccgactggaaatatcaatgccgtggaaaatagtggcaattttgccgcgaatgacacccagttcgcgtagttttgctgcggttacccccgccgggccaaaatgagcgatgaacacatcggcgcgaaacggtgttgcgacctgaccgcaaatggcagacaaaatcagattccgcgactcggcaccatagcgtttgaggttgagcgcatgccaggtatttttacgatgaatgccgcgtaaggtctggctggcgcggtggcgcagtttcgctactttgcccgcaggttcgtcctgtaaccaacgggttcttgcggcaaggttgtatttcgtccatgccgcgtgggtgttctgggtgtcgcctttttgcagcgcaacaatctccacctcaaatcccatatcaataaacgcggtaatttgattgaggacgaaggtttccgacgacagcggaaatttcagtaaaaagaagccgaccttcatttcacctccccgatgcgctcaagcacagattgcaccatctgcattcctgtctgacgctcacgactgacggcttcgctaagtcgtgtgttcagcgccggaagctggcctaaggtatccgcaaccatcgcttgcaggctgccgtctaataaatgacggatatcaattgccatctccggtagtcccagctgctgcatgatcccggcggatttatgttcatagttgatggcaatcgccggagtagcaaagttcattgagataatagcggagtgcagacgcgtaccaacggtgagttcacaggcaccgagaattttgcccatttccagatcgttaagttcatccatcactacgtggtaacgggcaggatcgctgatatgctggcgcaggttgagcgccaccatgcggtcgtctttgttatagctgtcgatgccggtacaggtggaaagcgcaatcacctgatacccttcgtcgagaatgcgattgaccaccccggcaaaggctttttcatacgcttgttgagtggtgccgagacgtttgtcgaacggtgccagttcgcgcagggtaattgccaccgttttctgttgtgcggcaacgtccagccagtgttgaacggcatagctggcggtgaaatcttcggtgtggtgatcgaccagccacgcggtatcgacgccatgttcaacttttgcggtagtgatattgctgcgtttcatcagatcaaggctgaccgattcgcgcaggatcagcgcgtcacagtgaccaaaaacgtagttcgccagttggttaaattgctcatcctggaagggaccgacgctgtgaccaatcataaacagcggctttttcgccataaacgtgcaaagcgcatgttcaaactgcggcacgccgtagagatcgacaaaaaacgatccgccgacctggataatggcgtcgtaacctgacagcaggcgcacgaagtcggtgaatccctgggcgatggcgatattacgcagcttgccagtgtcggtgacgcgtgagagcaatacctgatgctggtagcggcgacggaggacttttttaacgcgcccgacaacgcccgccgcgctgttgtgttgtttcatttgcaggaacagcggatcgcccattaccgggcggttgagcagccaggaagaactgaccggatagcggctcatcacgtccacttcggcttgtggattgaggatgttgatggcatcaagtaagccgcgcaagatggcgctgtcgccacgattgccgcaagtgtggttgcccagaataagtaatttcattttttcctcataaatttgatgccaggtgaggctgtgtttgttttgttcgttgccgctttttgcctgatgcgacgctgacgcgtcttatcaggcctacaagacccgagcacagaaccgtaggccggataaggcgttttacgccgcatccggcaaccgttgtcggaaccgaaaacagcaactcaccccgcccgtaaaagcattttcattttttcgctgcgacaaaactgacgcttcacttccaccaccagcggatggcgcgacagcacaatcatcaccacaaacgccagcacgcccgcggctatttgcaccgccagcagcatccccagcgccagttgccctttcagtacaatgcccagcgcataactgaccaccagcgtcggcagcgagagataaaacggcagccataaactcaggatgtactggcgataactggaaccaagaaccggtttaatcatcacgaagtaactcagaatggtgttgataatctgcaccagcaggaagccaagcgtgacgccgattgcgcccgccatctgcccaccaataacaatcgccggaataaacagaaatgttttgaatacgttgaatttaaagctgatatcgacccgcgctttcgccatcagcagcgaaccaatcgggttacccacggagcgcagcagacccaccacacacagcaattgcagcaccggaataatgctgttccacttctcaccaaagaccagcggtacaaagttattcgacaccaccatcagcccgagcagcgccggaaagttgataatccccaccaccgacagcagcttgtagaagttcacgcgcagcttttcggtgtcgtcctgaattttggcaaacgccggaaacaacacgcgggtgataattgggttcagcttcatcggtggcacaacggccacgttgtacgccaggttgtatccccctgccacgcccgcgccgagaatacgcgccagcaccagcgttgaaaggttggtattgagatagttgatgatgctgtccgccgtcagccaggcaccaaaacgtaagtttggtgccaccgacgccagcgagaaatgcagacctgggcgataaatttttcgaccaaagtagccaaacagcagcgttcttactgcactattgaccagataaccgaggatcgcggtcatcgccagcggccagaaatgggcgctaaccaccgtaaaagtaaagcccgccagcaccgcgctggtttcgatcatgccgattttgttgaactccagctccttctgcatcaacgcgcggaactgttgcccgtgggggatcaccacaaacgccagcgacaatgttttaatcaacggtgccaggtccgggttattcagcacgtcaccaatggcatcactcaacaaaaacaccgccacacacaccacgatccccagcccgacgttcagccagtacagcgtggtgagttccaggtggctgatttcttttcgctgaataatcgagttagcgataccgaagtcagaaagcgtatctgccagcgcgatgatcaccagcgacacggtaagcaaaccgaactggtggttgtcgataatccgcgccagcacggtcatctgcaccagcccgaggccgatgatgatcaccgtggcaatcgccgaccacttcgcgccgctgatggtcttttcacgtaagctcatatcaatatgccgctttgttaacgaagcccttgaataccgtcaggaaaacgattttgatatcgaaccagacgctccattcgcggatgtactcaaggtcgaactcgacgcgtttttccattttctccagcgtgtcggtttcgccacgccagccattaatctgcgcccagccggtaatgcccggtttcaccttatggcgcagcatgtagccttcaatgagctggcgatactgttcgttatgcgccaccgcgtgtggacgtggaccgacaatcgacatccccccggtcagcacattgataaactgcggcaattcatccagcgaggtgcggcgcagaaagttccccactttggtgacgcgcggatcgttctgcgtcgcctgggtcaccactttgtcgttctccatcactttcatggaacgaaacttccacactttgatcggcttgccatccatgccatagcgagtctggcggaaaataaccggccctggtgaactgagtttcaccgccagcgcaatacagcacagcaccggggagatcagcagcagaataagcgtcgccagcacaatgtcttccgcacgtttgagcaggcggttaaccccggaaagcggcgtatcatacagcggcaccaccggaacgccgttcatctcttcgagacgtgaatggagaatgttgaaggtaaagacatcggggatcagcagcaccgaacaggtggtatccgccagttgatggaccagttttttcactcgcgcgccgtcgcacatttgcatcgcgatatagacgttatgaattttgcccgctttcgcatcctcgaccagctgttgcagattgcccgcccagtcgttagaaacgccgcccggtttcgggtcgtggtaaacgcccaccacttcaaaccctaaccacggctgattacggaagctctccatcagcatttgtccggcggctaaatcccccgccaccgcgaccatgcgcttgttatagccatgattacgcagccagcccgccccaatgcgaatacatgaacggcaaaccaccagtccgatactggtcagcccataccacgccagccagattttcagttgcgtgtcgaaatcattgttgaacgccaccagtccggcactgaaaatcacgcttaaggtccagttttgtagcaatagggcaaattctgtcgctgcccgaacaccgcgccatgagcgataaaaatcggtgatgccgcccagcatctggaacaccaccagcgtaatcaacgccaccaacaggtgcatgtagaggaatgacagtccgctcacttcgcaaaccagccatagtccggcaaacatgatggtgatatctgaaaagcgttgcaccatagagattaacgatgcattggttttcgctcgctcgcgcttttttagatttgtcatcgttgttcctgttattagccccttacccgcagtggggtaagggaagatccgacattactcattcagcaacgtcagcagagttcgcgttcgcgcttccatcagcggcacatcaccgcgcgattccacattcaaccgcaccaccggttcggtgttggaggtgcgcaggttaaagcgccagtcggcaaaggtcatgctgatgccatcggtacgatccaccgccagcgcctcacggctaaaatgctgttcgacgcgattaatcgcctcaacgggttgcgccagtttgctgttgatctcaccgcttgccggaaacgccgccatccggtcgcgcaccagttcgcccagcgtttttcctttcaggcacaccagttcggctaccagcagccacgggatcatgccgctgtcgcagtaagcgaaatcacggaagtaatggtgagcgctcatttcgccaccgtagatggcgtcttccttgcgcatccgttctttaataaaggcgtgtccggttttcgacattaccggggtgccgcctgcggcagtcaccacatcaatagtgttccaggagagacgcggatcgtggatgatcttcgcgccgggatttttttcgaggaacgcttctgccagcaggccgacaatgtagtagccctcgataaactgccctttttcgtcaaacagaaaacagcggtcaaaatcgccatcaaaggcaatgcccatatccgcgccgtgtttgatgaccgcattgcgggtgtcgtcgcgacattccggcagcagcgggttaggaataccgttggggaaattgccgtccggcgtgttgtgcactttgatcaattccacaggtgcgccgagggctttaaagcgggcttcgatagcgtccaccaccggacccgctgcgccattcccggagttaatcaccagcttgagcggcgtgaggtttttgacattgatataaccgaacaggtgatcaacgtaagcgtcacgcaggttgatttgctgatagcgaccgcgtttggtttcatcgacgggaggaaagtcgttggcttcagccaggcgctggacatcgcgcagtccggtatcaccgctgatcgggcgagccccttcgcgcaccagtttcatgccgttgtaatccatcgggttatggctggcggtaacttcaatgccgccatccacaccgagatggaacgtggcgaaatagatctcttcggtgccggacatgccaatatccagcacatcgacgcccgcatcctgcaaaccttttgccagcgccagttttaaggtttcgctggtgaggcggacatcaccgcctaacacaatggttttcggtttgagaaatttgccataggcacgaccaatgcgccaggcaatatcttcattcagttcttcgcctaatttcccgcgaatatcataggctttaaagcaggttaattttttcatatcgttaccctttttcaggcaatactcggccatgaccgaagcggccaattttgtttttgtcgttatttacatcgcggtttcgcattcattgcctgatgcgacgctgccgcgtcttatcaggcctacaaatccgaaccgtaggttggataaggcgttcacgccgcatccgacaaacagcgcctgatgcgacgctgccgcgtcttatcaggcctacaaaaccgaaccgtaggtcggataaggcgttcacgccgcatccgacaaacagcgcctgatgcgacgtttacacccgtccgtagcgatccgcgaagcgcaccacatcatcctcttcgagataagagccggagcgcacttcaattaaatcgagcggaattttccccgggttttccaggcagtgcgtcgcccccagcggaatataaatggactcgttttcaccaagcagtttgatatcaccgtcaatagtgacttttgccgttcccgcgacaaccacccagtgttccgcgcggtgatggtgcatctgtaccgacaagccttcgcccggtttcacggtgatgcgtttcacctggtagcggtcgcccgcgtcgatagagtcatatttgccccacgggcgatagacttcgcgatgtacccgatgctcatggcgaccatcggctttgatctgctcgaccacttttttcacatcctgcaccgcgttacggtcggcaatcagcatcgcatctttggtctgcaccactaccagatctttcaccccgacggtggtgaccaggccagattcggcatacacatagctgttttcagttttgtgattaatcacatcgccgtggcaaacattgccctcggcggtgtgggcgctgatctcccataatgaagaccaggaaccgacatcgctccagcccgcatccatcggtaccacaacggcatctgccgtacgttccatgaccgcgtaatccaccgactcttccgggcaggcgagaaacgcttcttcatccacacgaataaaatcgagatccggatcgacggcgctcatcgccttttcacaggcatcgagaatatccggacgatattttttcagttcttcgagatagcgtccggcgcggaacaggaacataccgctgttccagtaatattcgccacttgccacataggcctgggcggtttccagattcggtttttcgacaaactgcgccacttcaaaggccaccgtatcctgctcacccgcagacacttcaccgcgacgaatatagccataaccggtttctggtagatccggcacaatgccgaaggtcaccagcttgcccgcttcggcatatggcatggcattacgcacggcggcgcggaacgcgtcttcatcggcaatcacatgatccgccgccagcaccagcattaacgggtcgctctccgggctatgacgttttgccgccagcgccgccagcgcaatggcaggtgcagtgttacgccctgccggttcgagaataatgttctcggtaagtttgttcagttgacgcagctgttccgcgacaataaagcggtgctgctcattgcaaatcaccaccgggctttcgcactccacgccgttcaggcggcagatggtggtttgcagcatggtgagatcgcctttcaggcataaaaactgcttggggtaaagtacgcgggaaagcggccataagcggctaccggagccacctgccatcacaactggatagagtttcgactgcgccataattatccccgaatatcatttataaattgacgtaacacgttctctttatcgagcgtgcgttcggcatattcacgtgccaccgtgttgtgtttaggcagcaggagcgcctgacggatccccgccaccagcgcctcgaccgattccggttctacgcaaaccgcaatgcccggaaaggtttcgcaaagctgccccagttctgtgtgggcttctgcggtaatcaccgcgttaccgcctactgccagaatattggtcagtttcgacggcaatacggcatctgccgcgccgcgtttttgcaccaccagatggcaatcgcccatcttcagcagtgcgggtaaagcgtcatacgattgcagcgggaagaattgcatgttgtgcagtccacgctgctgcgccattttttccagccgcgctttgccgccgccctgcccgacaatggcaaaaatcagcggttcatcgcgcaggcgatcggctgcttcaataacgttttccagcccctgcttttcaccaatattgccggagtaaagaatgatttttttgttattcggcaggccaagctggttacgaaggtcatcaacatcggcatctgcaacatgctgaaaacgggcgatttccgaccagttggggaagaagatgacgttttccgccgccacgcctttttcgatggctttattcatcatcgaacgcgaaatcgtggagacgttatcgacgttatgcagtccgctacgttcgaacgccgttgccagctgtgccactttgccgcctttaccttttccggcaaggcccagccccagcatggcgtccacttcgtaatcctgaatatgcagcacggtacgcgcaccagagagtttcgccagcaggcgcattcccggcgtgcaaaacagcgttggcaccacgccaataatgcgatccggcttccagcgacgttgcgccatcaacgggaaaaaactgctgacggcaaaactgccgagatgcaacaggcgtttcagggtgctcggctgttttggcacgtacagcgggcagcgccacaccgtggcggccccctcttctcgtttgtaccgccaggcggaatagttctcgcccacttgccactgcgggtagtaaggcggtgcggtaataacccgcacctcatgaccttgcgccgccagccattccaccatctcgccggtgtatttgccgatgccggttaactccggcgagtagttaatgccgtagaccagtattttcataatccgggtactccggcacgcttctcagcgagaaaataggcgcggctgttagcgtgaacattgtcactggcgagcagtgcgtccggcgtcagccagcggtaatcgtcatgctgctcatccggcagtaacagttcttcttccgctactctgaagcgaaaaccgagcaccacatagtgcgtggtgaaatccgtgccggagaagttatcgtcataaaagtgctgccagacaccgtaaaactggcctgctgttatcggcagacgcagccccagttccgccatcgtcagccgctcaaatgcggcttccagcgtttcgtctttctgcacgcgccctcccggcacaaaccagtaaccctgcgccgggcggttggttcttttgccaagcagaaactcgccgcgactgttctcgacaataaagtcgagagagacaagcggagtggagcgcactaccgtggcaaagtcttcctgacgtaaaaacatcattacccccgaaagcggtcttgattctcaaggaaccactggtaagtgctggcaagccccgcttccagtgagatttcgtgataccagccaagctgatgcaggcgcgtcacatccagcagtttgcgcggcgtaccatccggtttgctggcatcaaaaaccacccgacctttgtaacccaccactttggcgatggtttgcgccagctcgcggatagtgcagtcaacgcccgtgccgacgttaatgtgcgacagcatcggctgggtgttctccagccagacttcgtgcgccagctccatgacatgaatgctcgccgccgccatatcatcgacgtgcaggaattcacgcatcggtgtaccgctgccccataccaccacgtccggtgcattctgtgccgtcgcctcgtggaagcgacgcagcaatgcagggatcacatgcgaattactcgggtggaagttgtcatgcgggccatacaggttggtcggcatgactgagcggtaatcgcgtccgtactggcggttgtatgattcgcacagtttgatcccggcgattttggcaatggcgtaaggctcgttggtcggctccagcgtgccctgcaataactcgctttctgccatcggctgttttgccagtttcgggtagatacaggacgatccaagaaacagcagtttgttcacgtcgttctgatgcgcggcgtgaatgatgttgctctcaatcatcatgttctggtagatgaaatccgccggataggtgttgttggcaacaatgccgcccactttcgccgccgccagatagacctggtcaatgcgttcgctggcaaagaaatcatgcaccgcgcggctgtccagcaggttcagctcgtcgcgggtgcgtaataccagttccacatcaccgcgctgttcgagctgccgcgtgatggcggaaccgaccattccgcgatggccagcgataaaaatgcgttgtctactcatgcttatgactccagcgcgatcgccacgtcgtagccgtgagatttcagcagagagtgttttttcgccgcttcgaggtcattagccaccatttcagacaccatctctctgagggtgatttccggtttccagcccagtttttcgtgcgctttggtcgggtcgccgagcagcgtttcaacttctgccggacggaagtaacgcgggtcaacggcgataatcacatcgcccggtttaacgcccggcgcgtcatgcccggtgacggaaaccacaatgcccttctcttcaacgcccgtgccttcaaagcgcagtttgatgcccagctgtgccgccgccatttccacgaactgacgtacggagtactgaacgccggtagcaataacgaaatcttccggttgttcctgttgcagcatcatccactgcatttttacgtagtctttggcatggccccagtcacgcagggaatccatattgccgaggtacaggcacgactccagcccctgggcgatgttggcgattgcgcgggtgattttgcgggtaacgaaggtttcgccacggcgcggggattcatggttgaagagaataccgttgcaggcgtacatgccgtaggattcgcggtagttaacggtgatccagtaggcgtacagtttggcgaccgcatacggagatcgcgggtagaacggcgtggtttctttctgcggaatttcctgcaccagaccgtacagttcagaagtggaagcctgatagaaacgagttttcttttccagaccgaggaagcggatcgcctcgagcaggcgcagcgtacccatcgcgtcgacgtcagcggtatattccggtgactcaaaagaaaccgcaacgtggctcattgcccccaggttgtacacttcatccggctgtacttcacgcaaaatgcgcgtcaggttggaggtatcactcaggtcgccataatgcagatggaatttcggattgcaggtgtgcggatcctgataaatgtgatccacgcgctcggtgttgaatgacgatgcgcgacgcttaataccatgcacctcgtaacctttttccagcagaaactctgccaggtaagaaccgtcttgtccggttacaccggtgatgagagcgacttttgacatgtcttattcctctgttttttttgaatttattcagtttcaacgcgttcgcgtatcaccactgcgggattcccccggcaaaccacatttgccggaagcgatttaaaaacactgcttcgtgcacccacgacggtgccgtcgccaatcgtgacgcctggggcaacaaaaacatcggttgccagccagcatttctcgccaatcacaataggcgtggcgttaatggtgaaatgttgacttgcatggtcgtggctcccggtgcataaataacttttttgcgatatcaccgaatgtgcgccaatggttatttcaccgagggtatataaattgacgtcatcgccgacccacgcgtaatcacctaaggttaatttccacggataggtaatttttactgacggacgaataactacgttttttcctatttttgcgccgaataaacgtaataaaaatgcccgccagcgatacaatacttgtggcgaccaggcaaatattgttgcctgtactgcccaccataattgcactttaatagcgttgccgccccggaaccctttcggcaccgagaaaccgcttaaatcttgcatcgttttcccttatattcagcttttgttatataaggctttcgtctttgaggtagtacgctggcgtaaatgccaggataattctgcccagaagccaggcacatgtaatatttgccgttggacttttttggcgtcagcacacaattccatattattggtggttgataccccacccatagaaaattcagacaccaggccattgagttttttaaatgcataacctgctttatacattttggctgccagcgcgtaatcagaagaaactttatattccaggtcataacgccattttttcaaaccggataccgggaaaaatatcgcctgatgactggcgggcaggctgtgataaatataccaacccggtttggcgctacgtttaattttatgcccgtcgccaaaatccagcagcgcatcgccggtgatcatcacgttatctttttgcatttttaacttacggacaaaatttgcggcatcctgatgaaaaatatcgcccgagttaagaaacaacgcgaacttgccttgtgccatcgcaatgcctttgttcatggcgtcgtagataccgttatctggctcgctgacaaagcgtaggttatagataccattgagattttccaggtactcacgggtgccgtcactggaaccgccatcgacaacaatccattcgaagctgatatcgtccgcctgcgccagatgcgccagtgaggcgtgtgttttgactatcccttcgaggttacgaaacgcgacagtgattatgctaagcaacatgttcttattcttacctcgtaatatttaacgcttttcgcaaaataaacggacaaacgattaaaaatgcatattccgggctaaatatcgaaccggtaaaaaacagagataccggagtaaaaagatataattgcacgcgaaaattgcggttatcaccaaaagcgttgatcatcatttttatcactttccccatgtaccacagcgataaaaacactgcgaaccaggaaaaataaataatcagcagatacaaaccattgtctatggtttttccgacatccgcaccgttaaatattccgaatgatgcgacgtattcataaagtgagccaaatctgactacaccgtcaatatgggtcaaagaataaccgaccatcaccagcggaccgacaatacgataatacgatgacgatccttccgtacctaaatcgcccagacgggtggaaatataaggaaacgcgattaccacaccaaccaggaatacagccagagaaatcaatgccaacggtaactttttcttaatcgcctctttattcagatattgaaatgcccactccagcaaataaaacaggataaaggtcataacccctgaaaacgatccggataatattatccctgcgagaatcatagcatcggttttaggcgttttgataccaaactgtttgatgctgagccaaattgagattaatgccagagcgaaaaatgccggttcgaaataaagtgctgtcgtgcgcttgccgccgaatttaatgaaattcagtacatagctgttgctgtaaatcagatatttcgaaatcgactccataatactgctgccaccggtgaggataatttgcgccatctccaccgccgccagcgccaccaccagcccgaccaccagataaaagaaacgtaatatcttgcgatggttgtgtggcgaaattgttttaaaacgaatactccacaccatgccaataatgatcacaatatagacaaacagcatggttgaagtgacgtatttactggcatccaacgactgaccaaacagatagttgaacgccgtgagtcccgcaccaatccctaaggcaatcatcaattttttaacgctgatgcgttctaaaaacagcagtaacaagacaggtaaaaaagtgacgatggtgatggggaaactttcgccaagctgggcgattttgacgttaaccagcaggtagatcagcggcagcagcaggtagctacagattctgatagaagttgacatactcctccagcatctgttgtccactgtaggtggcgcggctgcgttggctgaactcagccagcgtggtaccaaatatcgcctgcgcgatttccggtttgcttaactgcaccagttgcagcacgtcttcttcgtcgacggttttaccgccggatttttgcaacacttcccgtgccgcgtcgctatgggtggcaatcaccggcacgccaattgataacgcctcacacaaaatcagcgggtagttatcgacgcgagaactgaacaccagcgcatccatctgattgagcgcgctcatcaacttgcgcttgtcagtttcaaagccgtgattaaccacgttgccagcggtgaacggcgagaacttaccaaaggtatgcagttcaattttgtcgcccagcgccatcatctcacgcaccagttgctggttagtcttgccgtcgtaacgcaggtcatgcgccaccaccgcgattttcggcttgccctgggtttcgcgcaccggaggcaagtccgccagaatcgcttcggttgccatatcaataccattattgataatccggcaacgccctggcccgtacagactattgaaagcgtcagccacatgctggctgggggaaataaactgacagcccagcgccagcatctcgcggaataactggcgtttgcccgccaccagctggtgcgcgcgatcaatcttcaccggcggatagttatttaaggtcgggcatttctggcagcccgttttccagccttcgcaaccgtcggtaaaggcgcagcgtccggtaacgctccagtggtcgtgtaacgtccagaccagagtgacgtccggtttatggtttttcaccttctcgcaaaagcgcaccacgctcttaagattcaaccagtagctgtgcagcacatgcaaatgcaggaccaccgggcccggtgtgcgagtaatggtgcgatataactcattgaaattgccaaacagatcgcgattaaacagacgaaacagggcaatattcgccatcgcggtcatccgcggcgtatgtttgatgacctgcggatagttctgatggctgacgctctctttgccgcctttgccgtagccatagacaaaatgtgacgccagcccctgttgcagcgcacgctggtggagatctaacgccacacctgctgccccgccttccgccagtcgcacattaaattgcagaatattcatttaattaccttcactcgcgctttttctcccaccaccagcgcgttgtccgggacagagtcgagcaccacgctgcccgcgcccacggtgacgttgttaccaagcgtgatatcaccaagaataatgacgttggcaccgagttcgacgccgttgccaatgtgtggacatgccatgttatcggcaccacgattgccgatagtgacgccgtggcgaatggtgaaatcatcccccgctaccacgtttttattgatcacgacggcgtaaccgtgatggatagtaaagcggcggccaatggtcgcggcagcctggatttcataaccgaaaaagcattcggtgataatgcgatacagcaccagcagcggggccgcccacagattgttgaggacgttctttttgcgccacaccgaacaaaaatgagcaacacgataggcaagaaccatgcagcacgggcgtaaactccagctgttggcgcgcagatcttccagcatctttagcgcccccgaataccatcagccagacgtttgccgttacgcaccgacagcagcgtcagcaaagtgcgccaggtcatacgtttattgcggatctggtagagggtaaacagctgatattttttgctggcgcggtcgaatttgtctttgtgcttgcggtaaaagtggaagtacccggagaattttttcggtgacgaggtgatctgcatttcaccgtgattgatatgcaggatctgcgtcgcctcttctactttccacggttcgccgtactccaccaccatccgcaggaagatgtcgtaatcctgtgccgctttcagttcggtatcgaacaaacactctttgaaacgccatgcccaggtaaagacctggttgccaatgatattgcgtttgtagaacaggcggcgtgaatacggcgatttgggatacagcggcaagcttgccggttgggaatagacttcgccctggcaaacgtagtcgttagcgtacaaaaaggcgtgtgtgaccagttgctgtttatgggcgaggaagacgctcagacggttgggtgtccattcgtcatcgtcatcaatcccggtgatatattccccttgcgccagcataatcgcctggttacgtaccgcgcacgccccgctgttaatgtcgttgtgaatgtaagtgatacgcggatcgttgagggcggtgacgtactgttgcagttgttcccaggaggtggagcaatcatccacgatgatcatctcccagttgctgtagtcctggcgcaaaaccgattttattgcccgaatcgccagttgttggcggttccaggtcggcatatagattgagatcagcggattgtctttcataggttgttctcccggcttatgagctggtttgcttgccggatgcggcgtgaacgccttatccggcctacggggcggtgcgaatgcaggcgtcgttatttcgcatccgacttatattcgtattcgtaatagccataatcctgatacgcgctggcgcggcggaagatggagttcagaatcacccctttcaccggaataccgttttgctcaaagcggctcagactggtttccacttctttcaatgtgttgaccgcataacgcgccaccattaacgtggttccaacatgacgaccaacaattgccgcatcggtcactgccagaatcggcggcgtatcaatcaacaccaggtcatagtttttactcgcccagttcaccagttcggcaaagcgttcgctcatcaacagttcagaaggatttggcggcacctgaccgcgcgggatcaggtcaaatttggcaatagaggtcggtttagcagcggtagtaatatcgccctgaccaatcagaatttccgacaggccattaacgttattagtgcccaacagctcgtgggtgtagcctttgcgcatatcgcagtcgatcaacaacacgcgtttattggtctggctgatcaccgccgccaggttggcgcagacaaaggttttaccaattgacgggctaaccccggtcatcatcaacacattgttctgtgcctgcatcatcgcgaagtgcaaactggtacgcagactacggatggcttcaatcgccagatcggttggattccccaccgccagtagctggctctgtttatagcgtttaatccctttgatggttttgacgctatcacgcgctttctgccattccgacagcgggatgctggcatagacgctaataccgtgttcttccagtacttgcgggctttcaatgccgcgattaaacaacgagcgcagcagcacacccacgatagaaagcatcaggccaaggataatcgcgccgaggataatcagccctttcttcggtttcagcacgccaggctgagtgattgccgggtcaacaatgcgcacatcgccgacggtgctggcctcggtgattttcagctcctgctctttattcagcagttgcatatagacctgctgaccagactcgacatcgcgggtcagacggacaatctcctgctgggttttcggcatcgccgttacgcgaccgttaagtttggctttttcgtcttccagcgcctgacgtttctccagcagcgtgcggtacgccgggtgaactttggtgtacagcttggagatttccgcctctttaaaggtcagttcgttcaactgcgcatcgatgttcaccatcgaatcgagcaccgcttttgcttccagcggcagatcaacagaatctttatcctgacggaaggcattcagtttgttttcggcaacatccaagcggctacgtacttccggtaactgttgcgcgaggaaggcgaggcttttcgacgcttccgccgatttgcgctcaatattttgttcctgatagttacgggcgatgctgttaagaatgtcgcggatctgttcacgatcttcaccggtataagtcaggctcaaaacgccagcgtctttgccgttctccgttaccgtcaggctgttttgcagttggttgatcatccccagcgtggagtatttggtgacggtaaactcactgcccgggctggcgtgaatggcttcaaccatcagcgtgacgccttcttttttcagcatctggcccgcttgcccccgggcgctaaagccgccgtcgctgctcagggtgtagtttttgttgtccagcacattaagcgtaaacacctgatccgccatctctttcgggcggttaaaggtggtcactttcaccgtctcgttctgacgtcccatcaggcgatcccagcccgcaccgaaaatcgggaacgtgtttttgctcactgcaatatcgaggtcgagatcgtccaccgttttaccaagcaccagacgcgaacgaatcaactggatctcggcgtccgatgcaggcggtttgttggctaatgccgaaccaatgtcctgcactaacgaattgccgctgttttgctcgatttgtaccagtgcgtcggcactataaatcggcgtggcgaagaaggtgtaaaccacggcacagagggcgaatacggtggtgatgccaatcacccaccagcgcgcttcaatgacggtgccgaccaggcgaccaatatcgatttcatcactgcccgttaccggagcggcatgttgttttactttttctgtcattcttatacctgctctgcgttcaatgcctgcgcccactggcgggcagaccgttcaagtaatgtgtacaccgctgcaaacgtttcccggcttttgcgatacggatcggggatttcacattcgttatcccagtgaccaaacagcatcactttgccgcgcatctcaggtgccatctcgcataagcgttcgatatggcgcttttccatggtcaaaatcaggtcatagttgcgacacaggcggcggctgatttgtcgtgcacagtggccttccagagacagttgatgttctgcggcgacgctgatagcggtaggatcagcgcccttaccgaccagcgcgccgagtccagcggactccactttcagttccgggtgataacgttgcagtaagcgttccgccgtcggggaacggcaaatattgccgacacagacaactaatatgttgttaaacatgacgattaccagttatgaatgtcgctggctgtatccgtcatgtaacggacaccgctaatagttggcagcaactgattgatcagacggttccagcgggaaaccggggcggtggtgacatacaccacgtcataaggttgcaggcggaattctgtcgccatcaccagcgacgtggcatcggacatatccagctggtagatattggcaatcttgccgttacgcccgccctcgcctttcagcggacgaatgacaaagatgccgctggcgttggaggtggtcatgtcgataccttcagcattgcccagggcttcagtcagggtcataccgctaaagtccattttcagggtgctctgtttcttcacttcacccatcacaaacactttcagatcatcattacgcggcacgtagagaatatcgccggggtaaagcagtcgattctggttgaggtcgccgttttgcatcagcgcctgcaaagaaatgcgttcttcacgaccattgtgtgttaacaccacgttgcgccagtcagcggtgtcggtcaggccacctgcggcgttgatggcgtcgagaatagtcagtggcacgttggtgatcgcctgttgaccggatttattcacctgaccggagatataggccttttgtgagcggaaggcggcgatattaacgtccacctgcgggtcagcgatgtacgtcgctaagcgcccggtaatatcactgcggatttcagcgagcgttttcccgactacgtggaccttgccgatatacgggtaaaacatagtgccgtcaggctgtacccagttgccggtgtcgctggagctgcggtactgaccggctggcgtggtgagttccgggtgatcccagacggtgacattaagaacgtcccccggcccgacgcgatactggtaattcgcgatctcactttccagcgtcatattggggcgcgctacattcgggcgtgggcgtaattggtcaatcaggcgcggggtcagcggataaacattcaccattttgtcgagatcgaaatcagcgtcctgctgtttgatgacgtctttgcccatcgtcgacatattgctgcccggaagtactgtgcaaccgcttatcaaggttactgacaccaataatggcatcaatttcattttggatttcatcattgtttatttatcactttggcagagtaattatcctgtgcactattaatagcaatgtcgccatgcacatttaccttgcagttaattgaataaaaatttaactggcatcagtcctaaaaaaattgatttcatccgtaggctattgacagaataattcagactggtctttcaggcatccagacacgctaccgcccctggctttctagctaccaatacactgatttagcttaatttttcaaaccctctctgcatacaatcgttgatgagaaagggttattgcggaaattaacttccgaatataaggtgacattatggtaattgaatattggctctccaataatgcaggaggaagtgttacagctaacggaatagcaggcaaggtaacaattcggcaattggctatttttaagaattatattaagtgtcattcaatattgtttttaggagtttctttaggttgacaatatttaatattgcgtctccacatgcgatatttcttaaataatgttttattattaccacttttaattcagggataatgtgatgttattaccctcaaataatatgagataaatagtgctgcaacattgcatttttgccccgatttatccatgatcgaattgtgacatttgtcatacaacgaataggttttgtacttactatggaatggattgccgatccgtctatctgggccgggttaatcacgctgattgtgatcgaactggtcctcggcattgataacctggtctttattgccatcctcgccgaaaaactaccgccgaagcagcgcgaccgcgcacgggttaccgggctgctgctggcgatgttaatgcgcctgttactgctggcgtcaatctcctggctggtcaccctgactcaaccgctgttcagcttccgctcgtttacctttagcgcccgcgacttaatcatgctgtttggtggtttcttcctgttgttcaaagccacgatggagctgaacgaacggctggaagggaaagacagcaataatcccacacaacgcaaaggtgcgaagttctggggggtggtgacacaaattgtggtactggacgccatcttctcactcgactcggtgattaccgccgtcgggatggtcgaccatttactggtcatgatggccgccgtggttatcgctatcagcctgatgttgatggccagcaagccgttaacccagttcgttaatagccacccgaccatcgttattctctgcttaagcttcctgttgatgattggctttagcctggtggcagaaggtttcggcttcgtcattccgaaaggctacctgtacgctgccattggtttctcggtgatgatcgaggcactcaatcagttggctatctttaaccggcgacgttttctttccgctaatcagacgctacgccagcggactaccgaagcggtaatgcgcctgcttagcgggcaaaaagaagatgcggaactggacgccgaaaccgcgtccatgctggtggatcatggaaaccagcagatctttaatccgcaggaacggcggatgattgagcgggtacttaatcttaaccagcgtaccgtcagcagcattatgacgtcgcgccacgatattgagcatatcgatctcaacgcgccggaagaagaaatccgccagttgctggagcgaaatcagcatacgcggctggtggttaccgacggtgatgacgcagaagatttgctcggtgttgttcacgttatcgacctgctacaacagtctctgcgcggcgaaccgctcaacctgcgggtgttgattcgccagccgctggtgttcccggaaaccttgccgttgttacctgccctggagcagttccgtaatgcccgcacgcactttgcttttgtagtggatgagtttggctcggtggaagggattgtgacattaagtgacgtcactgaaaccattgccggtaacttaccgaacgaagtggaagagatcgacgcccgccatgatattcagaaaaatgcggacggttcctggacggcgaatggccatatgccgctggaggatctggtgcaatatgtgccgctaccgctggatgaaaaacgtgaatatcacaccattgccgggctgttgatggaatatttgcagcgtattccaaaacctggcgaagaagttcaggtgggggattatttgcttaaaacgttgcaggtagaaagccatcgcgtgcagaaggtgcagattataccgctgcgtaaggatggcgagatggagtacgaggtgtgatggtatcggtcattttacccgatgctgcgtaacgccttataacttcagcaatgaagcgttgtctgtggtaaacggacatcacagcgggggtgtgggcccgggttgccagggtggtggagattgagccaccctggcacgttcaccggcttgagcgttccatagtagcgaggaacatcaagtgaacggaacagccttcgatcttacatattcagaatataatgatgccgccacgaacgcctgatgcgacgctttacgcgtcttatcaggcctacaggactggtcacctggtaacctacatcttctccagcaacttcttcacatctttgccattgcgggaatctttattccgctcggcccagtcattcaggcgacgtttcgcttcgtcctgtagatgtttgcgcagtaactgatccacttgcagactgtaattgagttgctgccagttgccataaacccgcagcggtactggcgtttctttcagaaaatcaatcagtttactttccccgttccagccacccacgacccgaatatcaaactgggtgtcgcaggtttgatctgccagattcaacatgccttcccctgtcagcgccagcacaggcgattgaccttgcatgtcgtttaacgtcacgacgccatccttcaacgtcaaatcggtggtaaagcggtcaagccgcgtcacgttatcaaagttttcagcggccttcacatcaccgccattacgctctaccgcttgctgaatcatctgctggaagttcatcccttccatgcgcgtgtcggtcatttcgacatgtgcctgcccttgccagttgtggcggaatgcgtcggcatctatgtcagcaccggagaaatcaccagccagtgacatttttccggtcaacgaaatcggatagttaaacgccttcagaatggtaccaatctcaacgttttccagccgtggctggaagtttatccgcggatttattgatgtcgcgtccagcgtgcccggcagtgaaacctgtccaccgttaagcttgccctgcagttgagtaatttccagcaaacccgacttgttggtcatttgcgtggcaacatctgtaaaattcattccgcgccagcgcacgttactggcctgcaacaaaatatcagccgtaaagccttgcagtccctgataggccggttcatcaatacgcgaagaaataaccgggcgcggcaacgttgattggctctgcccctgctgcgcggcaccgttttcaccattcgcggtttcattaagcgggatgaggttgtcaagattcagttgcgggaattgcagtctcagctgccattcaggtttctctgtcagcgtgacctgtgcttgcccgctcagcgtactgtcattggcggtcaagctgatttggttaaatgaaaggcgtttatgtgactcctgccactgggcctggaaactcccctgcccctgaataccttgttttggtaaatcggcaccctgcaactgccagttaatttgttcaatagcagccgttaaatcatgcggataatcagaagcatctaccgtaccgttaagggatatcgtgagatcgcgctgatcgcgattaacccgcccggagaactcaaatgaaccacgatgttggggatcttgttccatttgcaggcgaatattgcggattgtcacctgctcgtcatcttcatgctggaacaccagcacgctgtccgccaccttaagactggatatatcaaacgaccatccgcgatcgtctgacagatccggcaaggtattgtcgcgcggtgcaaccggagcgtcttcactgcgcaccgcttccgtctgcggcgtcagttggatcactgccccttttagcatcacctgcttaacgctcagttgatgactcagtagtggtaaaagcgccacgtccagacgcatgttgtcggcgcgaaccagtggctggctcgcgccctgggcggtgagagacattcgcccggagaggatactaagctgcggccagacgtgccaacgcagtggcccgtcgagctgcaattgataaccgctatgtgcagcaacttgcttgaccatatagtcgcggaaatcattcggattcaccagcaacactaacgcagataacccggccaccagcacgaccaggagtatcatcagcgtcgtcagaaatcgtctcatggtatcctcaatgggcctgaattagtctttatcgattcggctggctaccgcgccctgctggttgcgatatttcgcatcttcacggcggttgtaaggtcgcgccgccgggccggaaagcggctcaaagctcagcgcaccaattaacatgcccggacgcagcgccagcggcagcttaccggagttgtagaactccagcacaatgcaaccagaccagcccggatcgatacggtgcgcggtgacgtgcaccatcagccccagacgcgccaaagaggaacgcccgtccagccagcccaccagatcggctggcagcgtcaccgactccagcgtcaccgccagcgccagctctcctgggtgaagatagaacgcctcgccctcgtcgagaacgatctcatcgctcatcacgcggtcaagcgcggcgctcacttcatctttgggaccgctcagatcgataaacgctgccgtgtgaccacggaaggtacgaaatttattgcccaggcgtacatccaccgtcgcgccgttaatacgctccactggcggacgtgggttgatcgacaaacggccttcatcaagccaagcttcaatatctcggtcacacagacgcatggcattttctcctttcgcgcatcactcccttaacgccaattacgtcaagggcataccaggttatcactgaacggtacacaatttatcaagcttattcaaagaactgacttattttcgctttcaatatatcgatcgcaatgcggtttttcccgccgcgcggcacgataatgtccgcatattgtttagaaggctcaatgaattgcaggaacatcgggcgcacggttttttgatattgcgccatcacggaatccattgaacgcccacgctcgttaacgtcacgcttgatgcggcgcatcaggcagatatccagcggggtatcaacgaaaatggagaagttaagttcgtcacgcaaacgcgcatccgtcagcaacaaaatgccttcgagaatgatgaccttcttcggctcaaccgtcaccgtttctttcatacgcgtatgttcaacatagctgtaaaccggcaggtcaattgccgagccgcgtttcaacgcttgtaaatgctcaagcagcagactgtgatccatcgcgctgggatggtcgtagttggtcttaacgcgttcttccatcgacagatggctttgatctttgtaatagcagtcttcgggaattacgccgatgtgttcatcaccgacttgctcacgcaattcacgataaagggtactggcaataagactcttgccggaagccgatgcgccagcgataccgataatgacgcactgatgagactgatcagtcatatatttagcgacctgattaacctggatgttaggaagggggcgacgaagcgccaaacgcggcaattatagggatttcatccgtctgataccagtcgaatagcgttgccgcgcgctcagagttaattgttgacaaagaattcccgggggcaaattacgttgatcagttttatgtaaggtaaaaaatgttatacgcagttgcgcaaattatccgcctttacgtcactttatgagcaattcgcatataaaatgtaaaacttttgtactagcataaacacagaaacgaatactggcgaccaggtcttgcggataaagcggtaatgagcaaacaatcacagcatgtattaattgccctgccccacccgctgcttcacctggtcagtttaggtttagtctcgtttatctttacccttttctcgcttgagctttcgcagtttggcacccaactcgccccactgtggttcccgacgtccatcatgatggtggcgttttatcgccatgccgggcgcatgtggccgggaattgcgctaagctgttcgctgggaaatatcgccgcatccatcctgcttttttccaccagctcgctgaacatgacctggacgaccatcaatattgttgaagccgtggtcggggcagtgctgctacgtaaattgctgccgtggtataaccccttgcaaaatctggctgactggctgcgtctggcactcggcagcgccattgttccacctctgttggggggtgttctggttgtcctgctgacgcccggagacgatcctctcagggcatttttgatatgggtactgtcagaatccatcggcgctctggcactggtgccgctgggattgttatttaaaccacactatctgctgcgccatcgcaacccacggttgctttttgagtcgctgctcacgttagccatcacactgacgttaagctggctttcgatgctgtatctgccgtggccttttactttcattattgtgctgttgatgtggagcgccgtgcgtctgccacgaatggaagcctttttgatcttccttaccacggtgatgatggtgtcgctgatgatggccgcggatccctccctgcttgctacgccgcgtacgtacctgatgagccatatgccgtggctaccgtttttgctgatcctgctgcccgccaacatcatgaccatggtgatgtatgcctttcgtgcggaacgcaaacacatttccgaaagcgaaacccactttcggaacgcgatggaatattccgctatcggtatggcgttagtgggcaccgagggacaatggctgcaaaccaacaaagcgctctgccagtttctcgggtacagtcaggaagagctgcgcggactcacctttcagcaactgacctggccggaggatctcaataaagatctccaacaggttgaaaagctgataagcggtgaaataaacacctattcaatggaaaaacgctactacaaccgcaatggcgatgttgtctgggcgttgcttgccgtctcactggtgcgccacacggatggcacgccgctctattttatcgctcagattgaagacattaacgagctaaaacgcaccgaacaggtcaatcagcaactgatggagcgcatcactctggctaacgaagcgggcgggattggcatctgggagtgggagttgaagccgaatatttttagctgggataagcggatgttcgagctgtatgaaattcctccacatatcaaaccgaactggcaggtgtggtacgagtgcgtgctgccggaagatcgccagcatgccgaaaaagtgattcgtgattcgttgcaatcacgctcgccctttaaactggaatttcgcattaccgtaaaagacggtattcgccatatccgcgccctcgccaaccgggtactgaataaagaaggcgaagtcgaacgtctcctcggcatcaatatggatatgaccgaagtgaaacagcttaacgaggcattgtttcaggaaaaagagcgcctgcacattacgcttgattccatcggtgaagccgtggtctgtattgatatggcgatgaaaattacctttatgaatccagtggcggagaagatgagcggctggacgcaggaagaagcgttaggtgttccgctcctgacggtgttgcatattacttttggcgacaacggaccattaatggagaacatttacagtgccgacacctcacgttccgcgatcgaacaagatgtggtgttgcactgtcggagcggcggcagttacgacgtgcattacagtattacgccgttaagtactctggacggcagcaatattggttcggttctggtgattcaggacgttaccgaatcacgcaaaatgctgcgccagctgagctacagcgcctcccatgatgcactgacgcatctcgccaaccgcgccagttttgagaaacaactgcgtatcctgctgcaaacggtaaacagtacgcatcagcgacatgcactggtgtttatcgatcttgatcgctttaaagcggtgaatgacagcgccgggcatgcggcgggcgacgctttgctgcgcgaactggcgtcgttgatgctgagtatgctgcgctccagtgacgtgctggcgcggctcggcggtgatgaatttggtctgctgctgccagactgcaatgttgaaagcgctcgttttatcgctacacgtattatcagtgctgtgaatgactatcactttatatgggaaggccgggtacatcgggtaggtgccagcgccgggattaccttgatcgatgacaacaatcatcaggcggcagaagtgatgtcgcaggctgatatcgcctgttatgcctccaaaaatggtggccggggccgggtgacggtttacgaaccgcagcaagctgccgcacatagcgaacgggcggcgatgtcgcttgatgaacagtggcggatgattaaagagaatcagttgatgatgctcgcccacggtgtcgcttcgccacggatcccggaagcgcgtaatttgtggctgatttcacttaagctctggagttgcgaaggcgagattattgatgaacaaacatttcgtcgtagcttcagcgatccggcgcttagccatgctcttgaccgccgggtattccacgaatttttccagcaggccgcaaaagcggttgccagtaaaggcataagcatcgccctccccctttccgttgccggtttgagtagcgccacgctggtgaatgatctgcttgagcagctggaaaatagccctctaccaccacggttattacatctgattattccggctgaagcgattttagatcacgcagaaagcgtgcaaaaactgcggctggcgggatgtcggatagtgctcagccaggtgggccgcgatctgcaaatcttcaactcgctgaaagcgaatatggcagattacctgctacttgatggtgagttatgcgccaacgtgcagggtaatttgatggatgagatgctgattacgattattcaggggcacgctcagcgactcgggatgaaaaccatcgccgggccagtcgttttacccttagtgatggatacgctttctggcatcggcgtcgatctgatttatggtgaggtgattgccgatgcccaaccgctggatttgctggtgaatagtagttatttcgcgattaactgaggcgtgcttccccatcgcctgatgcgacgctaacgcgtcttatcatgcctacaaatcgctcattccccaggccggataaggcgctcgcaccgcatccggcgaccaacgtcatgcttcgtctggttgccagccttccgtataccagatatgcaacagcgcataagaacgccagggcttccagcgctcggcataacggcggatttgcgccggtgtcattcccggaaatcgctgtttaatcagataatcatccggcaggaaaacatctttcgcctgccagccacgcaaagcaaaataattcgccgtccagcgcccgatacccggaaaagtttgcagcgttttcatcgcctgctccacatcgcccggtattgtcattggtaaggtgccctccagcgccgcatttgccagatgaatcagcgcctctgcccgtttcaacggcatacctaacgcttttaatgcctgcgggtctgctgctgccagccgctgaggcgtggggaagcagatatactccggaaaatcatccagccgttcgccataaagctgtaccactttggcagtcaattttgccgccatcgccacgctcaccagttggcctaaaatcgcccgcacgccctgctcaaaagcatcaacactgccgggtaaacgcaatccgggccgcgccgcgcctaacctgcccaacgcaccgttaacaatttgtgggttacattgcagatcaaacaggcggctcattttcgccagacactctgcggcaacaggttctaaacctgcacttaaatttatgtgcagagtatggcgggctatatccggaatagcagtcaccacgccgcgatattcgcccaccgccagactacgggcataataactgtccgcgaccgtttccacaccgctcaccgcacgggcggcgagaaatcccaacatccacgaccagtcatacggcggctgccagttcagggtatacatcgcatctccttattcatccgctttcagcataaacgttattcagacgctgcgctttgctttcatattccggttgtcgcgacggcaacatttcgctaaagtcacgccccttcttcaccggcatggggattatttcgtgtttattggttttgattacggtacagcaaactgttcagtggcggtcatgcgtgacggtaaaccgcacttgctaaaaatggaaaacgacagcacgctgctgccttcaatgctttgcgcgccaacgcgtgaagcggtaagcgaatggctgtaccgccatcatgatgttccggcagacgacgatgaaacgcaggcgctgttgcgtcgggcgattcgttataaccgcgaagaagatatcgatgttacggcgaaaagcgtgcagttcggtctttcctcactggcacagtacattgatgatccagaagaagtgtggtttgtgaaatcaccaaaatcgttcctcggtgccagcggcttaaaaccgcagcaggtagcgctgtttgaggatctggtctgcgcaatgatgttgcacattcgccagcaggcgcaggcgcagctgccagaagcgattactcaggcggtgattggtcgcccgatcaacttccaggggctgggcggcgatgaagcaaacgcccaggcgcaagggattctggaacgcgcggcgaagcgtgccggattcagggacgtggtattccagtacgagccggtcgcggctgggctggattacgaagccaccttgcaggaagaaaaacgggtgctggtggtggatatcggcggtggtacgactgactgttcattgctgctgatgggaccgcagtggcgttcgcgtctcgatcgtgaagccagcctgctgggtcacagtggttgtcgtattggcggtaacgatctggatatcgccctggcgtttaaaaacctgatgccactgctgggtatgggtggcgaaaccgaaaaaggcatcgccctgccgatcctgccgtggtggaatgcggttgccatcaacgacgtacctgcgcagagtgatttctacagtagtgccaacggtcgtctgcttaacgatctggtacgcgatgcccgcgaaccggaaaaagtggccctgttacagaaagtctggcgtcagcgtttaagctatcgcctggtgcgtagcgcagaagagtgcaaaattgctctttcaagcgtagcggaaacccgcgcctcactgccgtttatcagcaatgaactggctacgctgattagccagcgagggctggaaagcgccctcagccagccactggcgcggattctggaacaggtgcaactggccctggataacgcccaggaaaaaccggacgttatctacctgaccggcggtagcgcccgttctccgctgattaaaaaagcgctggcagaacagttgccgggcattccgattgcaggcggcgatgactttggctccgtcaccgccgggctggcacgctgggcggaagtggtgtttcgttaattgaaaaatggctcagcagcggcttaaatctgcctgcgcctgagccagtttttctgctgcctgacgtaacggttccatcaacggcatggtccgtgctggagcatgaaggcggaatcgctgcaactctgtcgcgccgactgtcaacgccgattccagccaatgtcgtttggcggtcattttcgccattaccgcttgtctgtctgctggcgttatcgcttcattcggcctgaacacaaaacggcgttcacagctcgctttccagtcgataaccgcctgggtcagatggtcgccaaaccctttcacttgcttaacgccacgacgggtaacatctgcggctgtttcaataccaaaagaccgtaacgccgctttacgcgcagggccaacgccgggaatagaggcaacatcaataaaaaatccctccagaaacttctgcttctgccgttcccttgcggtgtcgtgaagtgctgccagagcacgtttttcttcttccggtaacccgagcatttcgtccttcattttttcgagcatcgtccgtttggcgataaaaccttccagcccgcccaactgttggatctggctgactaaatggtcatagtccattttcgcgcgattaaatgcctcacggcgttgctgaacttctgctttgtacgctttgcttgtcagactgccaataatccagatagccgacagcacaggaaccaaaataatataacgcggttctgcctgaaggccgcaaagcaacagcgataacgctgacagtgcgatctcaatcagaatgatgtattcgcgccgtaacaggcctaaaggaagcggcctgccagtcggttggaaatgatcgggtaatggcaattgcaatgctggcggtgctactgacgccatcaccatcgcccagactttcgccagcacaaaatcaccgctggtggtaatgacctcttcgccgagatcaataaaatagataacgccttgattatccagcgcacaccacgggcagtcagtcaaatgagcggagtaaacatgcattgccgaaacggtacatttctttaactgttggcgtagtaaatcaagtgccgctacccacgcttttgccgtcggacgcccggttgccacgccactttccgtaaacgcctgctgaaacatggcttcaacatcgcccggtaacatcgccagcggaatagatcgtggcggcggttttaaaccacgtcgctgattatctgacgcgtaggcataacggaaatgggcaatatccgtctccagcgcattacccgcatcagagataagcggcacaccggaataaggatgccgaccaccaaacaagacgtgaaaaatcaacaaggcaaggccaaaattatcgtgattttctgtacgttcaaagccgacaaatgacgacaaggtttgtagctctggcggcgtaaaatgcgacacgccgacttcgcataaatgcagtgtgccattggcgttaatctgaaaggagtcgctatcaatcaacaccactttgctgtcgcgacctaccataaaactgttctggtttacgtcacccacgacgtgcccgtgctcgtgaaccgtagcaaaagatgaagcaatattgcgcgcaacatagagtagaaaatcccacgcacaatgagggtaactctggcgacgatgtgccgggctatagatcatatgaatcggttctttaccagaaacttttggcatcataaaaccgataacttttccgcctcgtccaccgtgaagcgttgcctgcggccaggcgacataattcaacaactgcgcgtcagctgtcgcagccataaaggcaagtttgtcctgttttgaggcgggtggcggcgtgtgataaatcttggcgacgctatcgacaaactcctcgatatcataaaccgcgccttcaccacctttgcccagttcacggcctggcgtaacgcactcaccagtagcagtatataaagtgggtttcatggtaaccacagcgccagtgccaacgttttatcatcatcggtacgctcgtttaccgccgggctggacaaaaactgctttaacaatttaggtaataaatcgagttgttcctgcgttgctgccgccagtccaatgaaaaacggggtaaagaaaggcacatgcggagaattatccagcatatttaacgccagtcgctgaataccatccgtaaatgctgcaactttatgcgcacgctcagtgctggtgaaagtttccagtctggaaacagcatcttcatcgctaatgaaatgcgtcatattggcatattcacccaccatcggcgtgagcggcagttccagaccacgaccaaaatccaccactacaccgccgtcgccaatttgcataatcaatgtgccattagccgatgaaatcaatcccagaaacgtgcaggcaaaatcgcgaactgctaatgctttggcttctgcctcggcaaaaagtcgttgacgaatggtcagtaccatatttgtggcgagaacatcattaagccccaattcaccgtcctgtactttttgcaccataaacgccatcgcttcattgacggcgagcttcgcgccttctcctccctgcgaaacgctacctgcgccatcagcaaggaacatcaccagtaatggctgctggtcatttagccaggcaacctgcatctggcaggcatcctgacaaggtaaatcagcgctaatgtgcgacgttccaacagcggatgcataaaccagacgccagctcacactgacgtccagccttttggcgcttccagcacaacttccgttcccggcgtggagcgggaaaccgaacgcagcgaactggataaccagctaaacagttcacggaattgtaatccctgcagagacaaaggctgacggacgctgatttgggccagcgtcttcatatccgccccctgaacaccgatggaaaagaaagcaaaccttttatcttcttccccccgaaacactttgttggctgcagcctgccactcatcggttggtgcaccatcggtaatcaggaaaatctacgggcgataatacgaaataccatttgcacgatactcacgtttccgctcctctaccatatccagggctttggtaatggccgcacccattggtgtatcgccctgggcaaacaggatgggcggaaaaaaattagcggcgctggtaaagggttgttccacatgcaccgggccgaacgtcacaatgccgagttccactctttttaaagccagcggatcagcaagcagttcatcacgaaaggtaaccaatccggcgttaagttcattaataggtctgccactcatcgagccagaaacatccagcagcagaatgcaggggcaacgtggttccgggttactggcaaaatcgctggtggcaaacgtgatttgttcgctcataagaaatcctttcttagagaattattgaggtccggtatcataccgactgcaataatgaaataagagcaaacgaagaaactttcagaattaggcccggcggcgcagaaaattttgctattcgcctcgcaagaacggagagccgtcgattgacactaagggcggagtgacataatttcaggagtgagggttagggagaggtttccccctccccctggtgttcttagtaagcctggaagctaatcactaagagtatcaccagtatgatgacgtgcttcctcataaccctttccttatttaaggccccttcctcgggaggggctttcccgtttcagcatcccgctgaaatcgtcggcttacctcctttcgccatgcatgcagtctatcgctgacttgcggataaaatagtttccagtgtgattattgcgtaacgtctcgcaaagaatatttgctggcaggatcgcagactgcaaagcctgcagattgacaatctgaccgtgaaggcatactttcaggagtgagggttgagcggggtttcccccgccctggtagtcttagtaagctggccagctaatgactaagagcaccacgatgatgagtagcttcatcatgaccctttccttatttaaggccccttcctcgggaggggctttcccgtttcagcatcccgctgaaatcgtcggcttacctcctttcgccctgaatacagtctatcgctaacgcgtgaacaaaatagtttcctctgtgattattgcgtaacgactcgcaaagaatatttgctggcaggatcgcagactgcaaagcctgcggattgacaatcttatcgtgaaggcatactttcaggagtgagggtagagcggggtttcccccgccctggtagtcttagtaagccgggaagctaatgactaagagcaccacgatgatgagtatcttcatcatgaccctttccttatttaagaccccttcctcgggaggggctttcccgtttcagcatcccgctgaaatcgtcggcttacctcctttcgccatgcatgcagtctatcgctaacgcgtagataaaatagtttcctgtgttattactggatgcgtgctcgcaaatgtgcccgccattcagacgattcccgatagtgtttcataattcctccatttttctcccttattggctggctacactagtatcattccgcgaaacgtttcaggaagagaaactcttaacgatgaaaggcagttataaatcccgttgggtaatcgtaatcgtggtggttatcgccgccatcgccgcattctggttctggcaaggccgcaatgactcccggagtgcagccccaggggcgacgaaacaagcgcagcaatcgccagcgggtggtcgccgtggtatgcgttccggcccattagccccggttcaggcggcgaccgccgtagaacaggcagttccgcgttacctcaccgggcttggcaccattaccgccgctaatactgttacggtgcgcagccgcgtggacggtcaactgatggcgttacatttccaggaaggccagcaggtcaaagcaggcgatttactggcagaaattgaccccagccagttcaaagttgcattagcacaagcccagggccaactggcaaaagataaagccacgcttgctaacgcccgccgtgacctggcgcgttatcagcaactggcaaaaaccaatctcgtatcccgtcaggagctggatgcccaacaggcgctggtcagtgaaaccgaaggcaccattaaggctgatgaagcaagcgtcgccagcgcgcagctgcaactcgactggagccgcatcaccgcaccagtcgatggtcgcgttggtctcaagcaggttgatgttggtaaccaaatctccagtggtgataccaccgggatcgtggtgatcacccagacgcatcctatcgatttgctctttaccctgccggaaagcgatatcgctaccgtcgtgcaggcacagaaagccggaaaaccgctggtggtagaagcctgggatcgcaccaactcgaagaaattaagtgaaggcacgctgttaagcctcgataaccaaatcgatgccacaaccggtacgattaaagtgaaagcacgctttaataatcaggatgatgcgctgtttcccaatcagtttgttaacgcgcgcatgttagtcgacaccgaacaaaacgccgtagtgatcccatcagccgccctgcaaatgggcaatgaaggccattttgtctgggtgctgaatagtgaaaacaaggtcagcaaacatctggtgacgccgggcattcaggacagtcagaaagtggtgatccgtgcaggtatttctgcgggcgatcgcgtggtgacagacggcattgatcgcctgaccgaaggggcgaaagtggaagtggtggaagcccagagcgccaccactccagaagagaaagccaccagccgcgaatacgcgaaaaaaggagcacgctcctgatgcaggtgttacccccgagcagcacaggcggcccgtctcgcctgtttattatgcgtcctgtcgccaccacgctgctgatggtggcgatcttactcgccgggattatcggttatcgcgccctgcccgtttcggcgctgccggaagtggactatccgaccattcaggtagtcacgctttacccaggtgcaagcccggatgtcatgacctctgccgttaccgcgccgctcgagcgccagttcgggcagatgtctggcctgaaacagatgtcgtcgcaaagttccggcggtgcgtcagttatcaccttacagttccagctaacattaccgctcgatgtcgccgagcaggaagtgcaggccgcgattaacgccgccactaacctgctaccgagcgatctgcctaacccgccggtttacagcaaagtgaacccggcagatccgccgatcatgacgctcgccgtcacctcaaccgccatgccgatgacgcaagtggaagatatggtggaaacccgcgtcgcgcagaaaatctcgcagatttccggcgtcggcctggtgacgctttccggcggtcagcgtccggctgttcgcgtcaaacttaacgctcaggcgattgccgccctcggcctgaccagcgaaaccgtgcgcaccgccattaccggcgctaacgttaactcggcaaaaggtagcctcgacggcccttcccgtgcggtcacgctttccgcgaacgaccagatgcaatccgccgaagagtatcgccagctaatcatcgcctaccagaacggcgcgccgattcgtcttggcgatgtcgcaaccgtagagcaaggtgcagaaaacagctggcttggcgcatgggcgaacaaagaacaggccattgtgatgaatgttcagcgccagcccggtgctaacattatctccaccgccgacagcatccggcagatgctgccacagctcaccgagagtctgccgaaatcggtgaaggtaacagtgctttccgatcgcaccaccaatatccgcgcatcggtcaacgatacccagtttgaattgatgatggctatcgcgctggtagtcatgattatctacctgtttttgcgcaatattccggcgaccatcattcccggcttcgcagtgccgctgtcgttaatcggcaccttcgcggtcatggtgtttctcgatttttcaatcaataacctgacgctgatggcgttaactatcgccaccgggttcgtggtcgatgacgccatcgtggtgatcgaaaatatttcccgctatatcgaaaaaggcgaaaaaccgttggcggcggcgctcaagggcgcaggtgaaatcggctttaccattatctcgctgaccttctcgctgattgcggtgttgatcccactgctgtttatgggcgatatcgtcgggcgactgttccgcgaatttgctattaccctggcggtagcgattttgatctcagcggtggtgtcgctgaccctgacaccgatgatgtgcgcgcggatgctcagccaggagtcgttgcgtaaacagaaccgcttctcccgtgcctcggaaaaaatgttcgacaggataatcgccgcctatggtcgtggactggcgaaagtgctgaatcatccgtggctgaccttaagcgtggcactcagcacgctgctgcttagcgtgctgctgtgggtgttcattccgaaaggtttcttcccggtacaggacaacggcattattcagggcactttgcaggcaccgcaatccagctcctttgccaatatggcccagcgacaacgccaggtcgcggacgtgattttgcaggatccggcagtgcaaagcctgacctcatttgttggcgttgatggcactaacccgtcgctgaacagtgcgcgtttgcagatcaacctcaaaccgttggatgaacgtgatgatcgggtgcaaaaagtcatcgcccgtctgcaaacggcggtagataaagtgccgggcgtcgatctcttcctgcaaccaacgcaggatctgactattgatactcaggtcagccgcacccagtaccagtttaccttgcaggccacgtcactggatgcgctcagtacctgggtgccacagttgatggaaaaactccagcagctgccacagctatctgatgtctccagcgactggcaggacaaagggctggtggcgtatgtcaatgttgatcgcgacagcgccagccgtctggggatcagcatggcggacgtcgataacgccctgtacaacgcgtttggtcagcggctgatttccactatttatactcaggccaaccagtatcgcgtggtgctggagtacaacaccgaaaataccccagggcttgcggcgctagataccattcgcctgaccagcagcgacggcggcgtggtgccgttaagctcaattgccaaagttgaacagcgttttgcgccgctttccatcaaccatctggatcagttcccggtaacgaccatctcttttaacgtgccagataactattcgctgggcgatgcggtgcaggcgattatggacaccgaaaagacgctgaatctgccggtggatatcaccacgcagttccagggcagcaccctcgccttccagtcggcgctgggcagcactgtctggctgattgtcgcggcggtggtggcgatgtatatagtgctcggcattctgtacgagagctttattcacccgatcaccattctctcgacgctacccacggcaggtgttggcgccctgctggcgttaatgattgccggtagcgaactggatgtgattgcgattatcggcattattttgctgatcggtatcgtgaagaagaacgccatcatgatgatcgacttcgcgctggctgctgagcgcgagcaaggcatgtcgccgcgcgatgcaatctaccaggcttgtctgttgcgttttcgtccgatcctgatgaccaccctggcggctctgcttggcgcgctgccgctgatgttgagtaccggggtcggcgcggaactgcgtcgtccgttaggtatcggcatggtcggcggcctgattgtcagccaggtgctgacgctgttcaccacgccggtgatttatctgctgtttgaccgcctggcattgtggaccaaaagtcgctttgcccgtcatgaagaggaggcgtaagtgaagttttttgccctcttcatttaccgcccggtggcgacgattttactgtcggtcgccattaccctgtgcggcatactgggcttccgtatgctgccggtcgccccgctgccgcaggtcgattttccggtgattatggtcagcgcctcgctgcccggtgcgtcgccggagacaatggcgtcttccgttgccacgccgctggagcgctcacttgggcgcattgccggggttagtgaaatgacctccagcagttcgctcggcagcacgcgcattattttgcagtttgattttgaccgggatatcaacggcgcagcgcgtgatgtgcaggcggcgatcaacgccgcacaaagtttgctgcccagtgggatgcccagccgtccgacctatcgcaaagcgaacccgtcggatgcgccaattatgatcctcacgctgacatccgatacttattcgcagggtgaactgtacgatttcgcctcgacgcagctggctccgacgatttcgcaaatcgacggtgttggtgatgtcgatgtcggcggcagctcactgcccgccgtacgcgtcgggctgaatccgcaggcgctgtttaatcagggcgtctcgctggacgacgtacgcactgccatcagcaatgccaacgtgcgtaaaccgcagggggcgctggaagatggcactcaccgctggcagatccagaccaatgatgagctaaaaaccgccgccgaatatcagccgctgattattcattacaacaacggcggcgcggttcgtctgggcgatgtggcgacagtgaccgactctgtacaggatgtacgtaacgccgggatgaccaatgccaaaccggctattttgctgatgatccgcaagctgccggaagccaatattatccagacggttgacagcatccgggcaaaattaccggagttgcaggaaaccattccggcggcgattgatctgcaaattgctcaggatcgctcccccaccattcgcgcctcgctggaagaagtcgagcaaacgctgattatctcggtggcgctggtgattctggtggtgtttttattcctgcgctcgggtcgcgcaactattattcccgccgttgcggtgccggtttcgctgattggtacgtttgcggcgatgtacctgtgcggtttcagtctcaataatctttcgttaatggcgctcaccatcgctactggtttcgtggtggatgacgccatcgtggtgctggaaaacattgcccgtcatctggaagcgggaatgaaaccgttgcaagccgcactgcaaggtactcgcgaagtcggttttacggtgctgtcgatgagtctgtcactggtggcggtgttcctgccgctgctgttgatgggcggattgccgggccgactgttacgcgaatttgccgtgacgctttctgtcgccattggtatatcgttgctggtttctctgacattaacgccaatgatgtgtggctggatgctgaaagccagcaagccgcgcgagcaaaagcgactgcgtggttttggtcgcatgttggtagccctgcaacaaggctacggcaagtcactgaaatgggtgctcaatcatacccgtctggtgggcgtggtgctgcttggcaccattgcgctgaatatctggctgtatatctcgatcccgaaaaccttcttcccggagcaggacactggcgtgttgatgggcgggattcaggcggatcagagtatttcgtttcaggcgatgcgcggtaagttgcaggatttcatgaaaattatccgtgacgatccggcagtggataatgtcaccggctttacaggcggttcgcgagtgaacagcgggatgatgtttatcaccctcaagccacgcgacgaacgcagcgaaacggcgcagcaaattatcgaccgtctgcgcgtaaaactggcgaaagaaccgggggcgaatctgttcctgatggcggtacaggatattcgcgttggtgggcgtcagtcgaacgccagctaccagtacacgttgttatccgacgacctggcggcactgcgagaatgggagccgaaaatccgcaaaaaactggcgacgttgccggaactggcggacgtgaactccgatcagcaggataacggcgcggagatgaatctggtttacgaccgcgacaccatggcacggctgggaatcgacgtacaagccgccaacagtctgttaaataacgccttcggtcagcggcaaatctcgaccatttaccagccgatgaaccagtataaagtggtgatggaagtggatccgcgctatacccaggacatcagtgcgctggaaaaaatgttcgttatcaataacgaaggcaaagcgatcccgctgtcgtatttcgctaaatggcaaccggcgaatgccccactatcggtgaatcatcagggattatcggcggcctcgaccatttcgtttaacctgccgaccggaaaatcgctctcggacgccagtgcggcgatcgatcgcgcaatgacccagcttggtgtgccttcgacggtgcgcggcagttttgccggcacggcgcaggtgttccaggagacgatgaactcgcaggtgatcctgattatcgccgccatcgccacggtgtatatcgtgctgggtatcctttacgagagttacgtacatccgctgacgattctctccaccctgccctcggcgggcgttggagcgctgttggcgctggagctgttcaatgccccgttcagcctaatcgccctgatagggatcatgctattaatcggcatcgtgaagaaaaacgccattatgatggtcgattttgcgcttgaagcccaacggcacggtaacctgacgccgcaggaagctattttccaggcctgtctgctgcgttttcgcccgattatgatgactaccctggcggcgctgtttggtgcgctgccgctggtattgtcgggcggcgacggctcggagctgcggcaacccctggggatcaccattgtcggcggactggtaatgagccagctccttacgctgtataccacgccggtggtgtatctctttttcgaccgtctgcggctgcgtttttcgcgtaaacctaaacaaacggtaaccgagtaaatgacagatcttcccgacagcacccgttggcaattgtggattgtggctttcggcttctttatgcagtcgctggacaccaccatcgtaaacaccgcccttccctcaatggcgcaaagcctcggggaaagtccgttgcatatgcacatggtcattgtctcttatgtgctgaccgtggcggtgatgctgcccgccagcggctggctggcggacaaagtcggcgtgcgcaatattttctttaccgccatcgtgctgtttactctcggttcactgttttgcgcgctttccggcacgctgaacgaactgttgctggcacgcgcgttacagggcgttggcggcgcgatgatggtgccggtcggcagattgacggtgatgaaaatcgtaccgcgcgagcaatatatggcggcgatgacctttgtcacgttacccggtcaggtcggtccgctgctcggtccggcgctcggcggtctgctggtggagtacgcatcgtggcactggatctttttgatcaacattccggtggggattatcggtgcgatcgccacattgctgttaatgccgaactacaccatgcagacgcggcgctttgatctctccggatttttattgctggcggttggcatggcggtattaaccctggcgctagacggcagtaaaggtacaggtttatcgccgctgacgattgcaggcctggtcgcagttggcgtggtggcactggtgctttatctgctgcacgccagaaataacaaccgtgccctgttcagtctgaaactgttccgtactcgtaccttttcgctgggcctggcggggagctttgccggacgtattggcagtggcatgttgccctttatgacaccggttttcctgcaaattggcctcggtttctcgccgtttcatgccggactgatgatgatcccgatggtgcttggcagcatgggaatgaagcgaattgtggtacaggtggtgaatcgctttggttatcgtcgggtactggtagcgaccacgctgggtctgtcgctggtcaccctgttgtttatgactaccgccctgctgggctggtactacgttttgccgttcgtcctgtttttacaagggatggtcaactcgacgcgtttctcctccatgaacaccctgacgctgaaagatctcccggacaatctggcgagcagcggcaacagcctgctgtcgatgattatgcaattgtcgatgagtatcggcgtcactatcgccgggctgttgctgggactttttggttcacagcatgtcagcgtcgacagcggcaccacacaaaccgtctttatgtacacctggcttagcatggcgttgatcatcgcccttccggcgttcatctttgccagagtgccgaacgatacgcatcaaaatgtagctatttcgcggcgaaaaaggagcgcgcaatgaagttctggcgacccggtattaccggcaaactgtttctggcgattttcgccacctgcattgtcttgctgatcagtatgcactgggcggtgcgtatcagttttgagcgtggctttattgattacatcaagcatggtaatgaacagcgattacaactgttaagtgatgcgcttggcgagcagtatgcgcagcatggcaactggcgcttcctgcgcaacaatgatcgctttgtctttcagatcctgcgttcatttgaacacgataattcggaagataaacccggcccgggtatgccaccgcacggctggcgtacccagttctgggtggttgatcaaaacaacaaagtgctggttggtccgcgagcgccgattccacctgacggtacacggcgacccattctggtcaacggtgcggaagttggcgcggtgatcgcctcccccgttgagcggttaacgcgcaatactgatatcaatttcgataaacaacagcggcaaaccagctggttgattgtcgccctggcaacgttactcgcggcacttgccacttttctgctggcgcgcggtttactggcaccggtaaaacgacttgtcgatggcacgcacaaactggcggcgggcgatttcactacccgcgtaacgcccaccagtgaagatgaactgggcaaactggcgcaagacttcaaccagcttgccagcacactggagaaaaaccagcaaatgcggcgcgattttatggccgatatttctcacgaactgcgtacgccattagcggtgctgcgcggtgaactggaagccattcaggatggcgtgcgtaaattcacgccggagacggtggcgtctttacaggcggaggtcggtacactgaccaaactggttgacgatctccatcagttgtcgatgtctgatgaaggcgctctcgcctatcaaaaagcaccggtagatttgatcccactgctggaagtggcgggcggcgcatttcgcgaacgattcgccagtcgtggcctgaaactgcaattttccctgccagacagtattaccgtatttggcgatcgcgaccgtttaatgcagttattcaataacttactggaaaacagcctgcgctacactgacagcggcggcagcctgcaaatctctgccgggcagcgcgacaaaacggtgcgcctgacctttgccgacagtgcgccaggtgtcagtgacgatcagctacaaaaattgtttgaacgtttttatcgcaccgaaggttcccgcaaccgtgccagcggcggttccgggctggggctggcgatttgcctgaacattgttgaagcacataatggtcgcattattgctgcccattcgccttttggcggggtaagcattacagtagagttaccgctggaacgggatttacagagagaagtatgaccgagttaccaatcgacgaaaacacaccgcgtattttgatcgtggaagatgaaccgaagctggggcagttgctcattgattatctgcgtgctgcgagctatgcgccgacgcttatcagccacggcgatcaggtactgccgtatgtgcgccagacaccaccggatctgatcctgttagatctgatgctccctggcaccgatggcctgacgctgtgccgggaaattcgtcgtttttctgacattccgatcgtgatggtgacggcaaaaatcgaagagatcgatcgcctgctggggctggagattggcgcagatgattatatctgtaagccgtacagcccacgggaagtggtagcgcgcgtcaaaaccattttgcgccgttgcaaaccgcagcgcgagttgcagcaacaggatgctgaaagcccgttgattatcgacgaaggtcgttttcaggcttcatggcgcggtaaaatgcttgacctgacgcctgcggaatttcgtctgctgaaaacgctctctcacgaaccaggaaaagtgttctcccgcgagcaattgctcaatcatctttatgacgactaccgcgtagtaaccgaccgcaccatcgacagccacattaaaaacctgcgccgcaagctggaatctctcgacgccgaacagtcatttatccgcgccgtttatggcgtcggttaccgctgggaagccgacgcctgccgcatcgtttagttttagcgacattattttgttagccggagatggcgttcagaccagatccggcaacattatcccacgcatggtcagcaaactgacattatctctccgccctggcaggcatcagaaaatcgctcatactttaatcggtaaacagcacctttagatgctgttttcgatacacaatttcaatcaaggagtcattatggctggttggtttgaactcagtaagagcagtgataatcagttccggtttgtgctaaaagcgggcaatggtgagactatcctcaccagcgagctttatacctcaaaagcctctgcggaaaagggcatcgcgtcggtgcgtagcaacagcccgcaagaagaacgctatgagaaaaaaacggcaagtaacggcaaattctatttcaatctgaaagccgctaatcatcaaattatcggctccagccagatgtacgccaccgcgcaatctcgtgaaaccggaattgcctccgttaaagccaatggcacaagccagacggtgaaagacaatacgtaattacgatgccgggcgtgggttgttggcgtccggcgctttaccagatccccccacagcgctacaatgcccgcccttaaagtgggggcactcccctaaccgcttcatcaggtgaagcggatctgacctgtcatcagaacgagagaattatgtttaaaccggaactcctttccccggcgggaacgctgaaaaatatgcgttacgctttcgcttatggcgcagatgctgtttatgcgggccagccgcgttactccctgcgtgtgcgcaacaacgaattcaaccacgaaaatcttcagctcggcatcaatgaagcccacgcgctggggaaaaagttttatgtcgtggtcaacattgcaccgcacaacgccaagctgaaaacctttatccgtgacctgaaaccggtggtggaaatggggccggatgcgctgattatgtccgatccagggctgattatgctggtgcgtgagcacttccctgaaatgccgatccacctctcggtgcaggctaacgccgtaaactgggcgacggtgaaattctggcagcaaatgggcctgacccgcgtgatcctctctcgcgagctgtcgctggaagagattgaagagatccgcaatcaggtgccggatatggagatcgagatcttcgttcacggcgcactgtgcatggcctactccggtcgctgcctgctctctggctatatcaacaagcgcgatccgaaccagggtacctgcaccaacgcctgccgctgggagtacaacgtccaggaagggaaagaagatgacgttggcaacatcgtacacaagtacgagccgattccggtgcaaaatgttgagccgacgctgggtatcggcgcgccaaccgacaaagtgtttatgatcgaagaagcccagcgtccgggcgagtatatgaccgcgtttgaagatgagcacggcacttacatcatgaactcgaaagatctgcgcgccatcgcccatgtagaacgcctgaccaaaatgggcgtgcattcgctgaaaatcgaaggccgtactaaatctttctactattgcgcacgcaccgcacaggtttaccgtaaagctatcgatgacgccgctgcgggcaaaccgttcgataccagcctgctggaaactctggaaggtctggcgcatcgtggctataccgaaggtttcctgcgtcgtcatactcacgacgattatcagaactacgaatacggttattcagtttctgaccgccagcagtttgttggtgagtttaccggtgagcgcaagggggacctcgcggcggtagcggtgaaaaataaattctccgttggcgacagccttgagctgatgacgccgcaaggcaacattaactttacccttgagcacatggaaaacgccaaaggtgaagcgatgccggtcgcaccaggcgatggttatactgtgtggctcccggtcccgcaggatcttgagctcaattacgctctgctgatgcgtaatttctccggggaaaccacgcgtaacccacacggtaagtgattaatttcgattatttttcccggatggaaaattcttagaaaccgatcacatacagctgcatttattaaggttatcatccgtttcgctgaaaaacataacccataaaatgctagctgtaccaggaaccacctccttagcctgtgtaatctcccttacacgggcttattttttacgtacaacaaattgaaataaaaggatttatttctggtcacgtccacacattgaccacatcgacaaaaaagcccctcgactgaggggctttctgtttgtaattacatccacataatttgctgccctgacggcaacgggtgcggcctcacggcgtggacttctcccggcttcacgatgtatcgctgtaccgactcataagtgatgaacgtggcgctgcaattcacgttctgacactggtgataacgctcttttgtcgtgtcagtgatatagcgacttgtacgcgcatgtgcggcatgctggcataaaggacaatgaaacatcgcgagcacctcttccggttttgttaatggtgccattttatttaatttatccttataaaacaaacagataaaacgaaacattaatcatcatcttctgtttcgtactccacatcagaaagcctgacctcaagctctaaggacgtcgtgaagccgctattattcagaaaatgtgtcaccttagtgattgtccagtcctgctcgtctatgacgcgcttaaagcctgacactctgaccggtgtttccgtgtaaatatcagcacgaccagtggcaaggctgatggagaactccgcaacgccccgttgcagtttatcccacttcgcctgagcggcgcgcatggcctgcgctttcgtggcatataccgtagtcagggcaaaaacgttgtcagcctcaccggccatgtattcaccttcgcgcgcttccggtacttttggcgctttcttctgcgtgaccggttttgctttcgggtgctccagtgcgcgcaggtgtttttctttctttttgcgtttcagttttaccttctgcttttgtggtttcgggtctttggtgtgtaaccactttgccgttacgccggtataggctccacggtcagcaatcgcaaaatgatggcggtcgccgtcgctgcgggttatggtgacctgcgggatttttttaccgctggccgtcaccccctgccccgctttgagaaacaacagttttcccatttttaccgagacctcaccgccgttgcgttctgcaagacgggtcaggaatttcgcatcagactcctgcgactggtcgatgtgcgggattttaattccggccagtgacggagcgacactggcttccagcctgttacgggaggctatcgcctcaacaatcgcaccgagcgtggtgtcatgccaggagccttcccggcgggaattgagcgtcccgcgaaaatctgcactccgggcgcggatggtgaccacatccggagcgccccggtgttcaacctcatcaacggtaaatttccctttgcataccagggcaaaacctttccagccgatataaaccgtcaggacagcgccacgaaccggcagcccgacctgcccgtcggcatcgttcagttcaatatcaagctggtcagcctcaaagccccggttatccgtcagggtcatactcatcagacggtcgctgatattgccggtaatatccctgctgtcgagcatcagcatgtaatccggcgtcagcgtactgcctgcatcaaatgtcagcgcatccagcattatcccgcccccgtcatacccgtgaatctggtcgccatactgccagccttaccgatgagcgattccgcctgtttaccgatatcgccataaagcgcggccagtgattcatcaacgcgggtgagtgacagcgtaaaatcaattttccggggtgtgccgtctgcaaagaaaatactccctgtttcactcaccctgctgatgacatacatgccgtaaatcatgccggtgccatccagcaacggccacgcccgtccctcctctgccatcagcctgagcgtggtcatcgtcagcttgccgccggtcagttcgggataaagcacaccggccagcgtcatgttttcctcacccacaccgagaaactggtaggcatcccgtttaccgatacgggaatttgacggccagcgataatctgattcacgctgcatggtctggtgtggcagcgtctggcgcatgaaaacaaacatccctaacgcgagcatcatttttcatcacctccttaaccgtcatgcatcatgctggcacgggcgcgcgcacgtttatcccgctcgtatttttcgagcgcatcctgtaactggcggtcaagctgtgtccccggcgcagtaccacccgtcaggctgatgtgatattcgtttttactctggtctacataagagcggccagccggtgccgtaaccggctgataagcctgataacctgcataagagctggtcgccggaatataaccaccggtgccatacgtggcggcatgagttctggcggctgtctggtcaagtgtgtctgactctttgttgatgaccccgagcttttccagtacccagtcaatgccgctgcgtaatttgttgaacgcattaagcggcagcatcagcgcgtcagccagtgcctgcccgaacatgacccccgtgtcacggcaacggttcagggtgtcctgggtggctttgaccggggcaatcaggtttttaaaccactgccacgcagcctgtaacttttcacccagccagtcaaacaccggcttaagtggcgtgaacagttctcccaccggcgcaaatgccgctttcagcccttccaccacaccgccaaagaatgcgctgacaggctcccagtatttacggataagcaacgccccggcgacaatggcggccaccacggccacaaccggccagctaatcgccccgatggcggtcataacagcactgctaaccgtcgtgaagactgcccccattgcgcctgctgccgcgatgatggcattgatgccagtgataaccggccaggctacaagaccaatggcaccgatgatgccaataagcgccagcgcgccaccgacaatgaggccgatggttgacgccagtgatttgtttttctggatccagccgtcgagttttaacacatactttgtggccgtctgcgtgagcttacgcagtgcgccttcctgctggtcaaacaggtctgtccccaccgcctcataagcggactgaaactccttaaagtcaccgccgaggttgtcctgcatgatatttaccagctcggcagtcttcccgtctgaggctttaaacgcagcggtcagtttgtccagctttccggttgaggcggcagtcatcagcacggcggcggctgagctggcctcctccccgaaaatagttttcatgtattcagcctgctgggcagtaccgagccggtttttctcaaaactggcctgcatttctttcagaatggtaaatattggccgggtgtttcccttgctgtctgaggttttcactccaagctctttgagtgcatcccatgcttttcccgtcggtgcctgcaggcggcttaacacggcacggcttcccgtccccgccattgagcctgtgatttttgcatcatgcagcgccccgaccattgcggcggtttcttcaatgctgacaccggcattttttgccacaggtgcggcataggtcagcgcatcgctcatgccgtcaaaatcggcggcggttttgttcatcgtcatggagagaacatccccgatatgagcgaccttatcgtttgaaagctgaaaggcggatttcatccccatcagcagggcggcgttttcttccatcgtgcggcggttcgccagcgccatattcagcgtgaccggcgttgccgcctgaatggcatcaacatccccacccgctttcgcgatgattatctgtgcaccggccgcatcatccgccgaggcggcggtattgtcgccgagctggcgcgcctgtttgcgtagtgcggtcatttcggcggagtcttttgccactccgagcacggcctgcaattctgagtttttctgagcaaactcataaccgggcatcagcaacttaactccggccatcgttcccgccgccgcaatccccacaccggcagcgcccactgaggccatatttcctgccagttcctttccggcctgataacgctgttttactgcgttaagttttgcctgttgtgcactgacacgcgccagtgcgtcacgctgacggttaagctgtgcggtggtttcactgatacggtttttcagtccctgctcatcatgtgcaagattgcgggtattaattcccacagcggccagttcccgctgctggcgtttaacggaatccgtcaggcggttatatttcgcctgtaagtcctccgccgcacgctttgcggattccagcactttcgcctgagcacgggtcggacgttcggtgtttttaaactgtgtggcaagggcttctgcttcctgccgagccttttcaagtgcatgaccagtcacggcgagctgtgcactggtcttgcggaatccctcaatacgggatgcctgaccgttcagctcgcgcagtgatttttgtgtttcccggatatcccccgacagcgacttgctcgctgtgcggatggatttaaacgggcgggatgcctggtcaacagccctgagcaatacctgtaattttacattgttactcattcgtgtttccgcttcgccggagcgccttttcgcgccatgtgatgagttcggtcaggctcatgggatacagttctgatggcggccagtgaaatatcactgccacatccgccatcaggtcatcgaccgagagatttttcggaaacgtcactgcaccgagttcggcgacaaaaaaccgaccaccttaccggccagcgccacaaggtcaggcagttccagcgcggcgacctcctgctcggtcagcatcggtgccgtcatgcgcggcagcactttaatcagtgcatcgacttcggagtttgcgaccgcagccagactgacaccgcgcagcgtcccggcattgggtttcatcagcgtgacctgttcgataacctgttcaccacgtttaaccggattatccagggtaatgacgttttctttgttcatggttttctcacttctgaatcggggttaaccggtcagccaggctgaccggatgaaaatcacaggccgatattgcggcggtgttgctccagccggtcgacgccgttcaccttctcaatcatgttgatggtgtcgatttcgaccagctccttaccgtccatcgtcagccggaaataggtgcagaccacggaaattttcgactcggtgtcttctccctgtttaccctcgccagtgtcgatttctttctgacgtccacgcatgaccacttcgacggccaccgtttcgccggtatcgtcgcgctggtaagagcctgcaaaacgaatcggcacggcatccacgccggttgcggcgtaaagctcccagataaccgaatccgggaagcccccgagcgaccactccattgacagcgcatcgtcatcaaggccgaggtctaccggtgcgctgccgttcatccccgcaccgcgatagttttcgagcttacgggtcagttttggcagcgtgacggactttgcaacgccctgatagctgtagccgttcagaaagacgttcattaacttgagtttgcgcggcattgccatcggtcaggctccttaattgctgttaaccgaggtgaccagatttgccaggtatttatcggtaatacgctggcgcagggtcaggttttcgagaggaggcaccggtgtatagtcgtagtcgatatacagttttccggccttgagggtttccgcatcgttggattcttcgctgaaccagcatgagccatccacgatatagccgtttgttttcagctcacggaatttggcattgatgccgtcaacgatgtcgcgaatcagcgttgcggtgatgggcttgtccaccgcccacatgtgcgcctcagccatcgtgtcggccagcacctgcgcggtgcgggtgtagttttcaaagaggaacagcgggtcatcagagcaggtacggttaccccagaagcggaaaccgtcgcggcgaatcagcgttgtgacgcctgactcattaagcaggtcagcatcggtgccggactcctgcaaatcccagaatacagatgcgctgatgccggtaacaccgttcaccccgacgttggacagcgttttatgccagccctgctcctggtcgattttggcacgcagacccagcgcacgggcggtggcatacgcggtggcggtggtactggtgaccgtatcccatgcgaggaaatccggccagatgaccatcagctcacgctggctgaaattctggcggtaggctttcacctcggaaatggtcttacagccccatgcgctgatatatccgaaagcgcgcagcttctgacagacggatgccagtgcaacagccacctctttggtatccagccccggcacaccgagaatacgcggtttaacaccggttaccgactccgccgccagcagggcttttagtccggtgtactgaccgttttcgtcggtggtgccgatgatattggaaacggtctgcgcgagtttcgtttcctcgtcatcaccggtgccgtcttccacgcgcacgacaacggtgaccggttttgactggtcagcgatggcctgcaacgatgccgccagcgtgccttttttaccggcctttgcaattgcgctctgcacattggtaatcagcacaggtttattgagggggaaggtttccgcatccgcatcgctggccgtgcagaccatgccgacaatggcagtggatacggtggaaatgacgcgggtgccgtcgttaatctccagcacctgcacgccgtgatgatagtcactcatccgtttaactccgtggttaatgggtgagtggtattttcagttgtgccggagatgtcaggctatttgtcccggttggctaagggatgacacaatttattctttgtcgctgatgagggaaattttttatagagcgtggacaggccaatatcaaaaatcagcgccacacgttgacgagattcccccgcagccagcaaccgtccgacctgctcccactcactcgcggtgagtttcggacgtctgccaccaatacgacctttggctctggccgcttccagtccggcgcgtgtccgctcgacaatgagttctcgctccatttcagccagggcacccatcacatgaaagaaaaaacgccccatcggcgtgctggtatcaatagcatccgtcagactgcgaaaattaacgccgcgttcgcgcagttcctcaaccagaatgaccagatgccgcatactacgccccagcctgtccagcttccagactaccagagtgtcacctgctgataatgttctgagcagttttttcagtcccggtctgtcggacttcgtgccgctgattttatcctcaaaaatccgctcgcatcctgcgcactccagcgcgttacgctgcaattccgtgttctggtcatttgttgacacgcgtacatagccaataagcatgagcatccccctgaataaaaaccggagatgatgccagttgcccgttatctctgcattttcataaacgttggtttgggagaagcggcaaaacggaatgtgggcaacggggaaaaccaagtcatcgggcattatctgaacataaaacactatcaataagttggagtcattacccgcgttgtcagtcatctccccctccctggatgcatcgttatatccgtgatgagcgatttttgatattaatatctttcaccatccgctattttcaccacttcagaaaacaaacttatttttattaatatcaattctttttctttgaacattcaactgcgatatttgtaaaaatattaaacaggcaaaaatacaatgacattaccaaccactatttattcatttcctgcatattcaccccgtttttcgtccaccgacaaaccagtaaaattaaaatttcatcaatacgcacgcgctacattactttcaaatcgtggaagagatcataattgcgatggcagacatactgttgagatccacaaactagatctctcagactggcaagcattcaataaactagcgatggcgtgtaatgcttacgatggaataacaatgaatggtgataattcttttggatggaaccatgaagctacattagataatattcacgcccagaaatacaataaagcttacgcgggtgcgagattaaccgcagaactgaaatatttattgcaagatgtcgaatccttcgaacccaacagtaaatacacaatacacgaggttgttttgggacctggttatactactccagactataccggccaatcgataggatacgttgtaacccttcctgcccaaatgcctaattgctggtcatctgaactaccaacaatcgatctttatatcgaccaacttcgcactgttacaggcgtttctaatgccctcggattcatcattgctgcattgctaaacgcgtattctgatttaccccatgatttgaaaattggtctacgttccttatcaaattcagcagcaatctactcgggtttaggtttcgagcgagtgccgcaggaccgagacatagggagtgatcgtatgcatctaacgccagcaaaccatcctgaattatggacacaagagaatggtgaatggatctacttacgaaactaatacctgacgaaaaatagaaagcaaaacgccgaccaatggtcggcgtttttacgtctcgttgaataacgaattattcagctactacgtttacgatcactttcgcgaatacttcgctgtgaacctggaagctcacttcgtgttcgccagtggtacgcagaacgccgttcggcagacgaacttcgctcttagccacttcaacgccagctgcagttacagcgtcagcgatgtcgcgagtaccgatggaaccgaacagtttaccttcgtcgccagctttagacgcgatggtaacagtttccagtgcattgattttctcagcgcgagcattagctgctgccagaacttcagccagtttagcttccagttcagcgcgacgtgcttcgaagaattcaatgtttttcttggtagctggaacagctttaccctgcggtaccaggaagttacgagcatagcccgctttaacgtttacctgatcacccaggctacccaggtttgctactttatcaagcagaataacttgcattaccttatcctctcaaagtcgtattaatggaccgtgaccgattactgatggcgatcagtgtacggcagcagggacaggtagcgagcgcgtttgatagcgcgagccagctgacgctggtattttgcacgggtaccggtgatacggcttgggacaatcttaccgctttcggtgatgtagtttttcagcgtagcgatatctttatagtcgatctcttgaacgccttccgcggtgaaacggcagaacttgcgacgacggaaataacgtgccatatggctagtctccagaatctatcaattcaatctgctcggcatgcaaaaccattttgctcagtccgttctttgccttgtggcatgaaatgaacccctgaacggttatgcgactgccgaccgttatactgtgagtaatggcctggttttcgtgtccgctaacaataacgggcatttggcaccacgcctgccggtgaaaaccggcttcctcctgcacagaacgatgctcaagcacgaactggcagtgaggaattcctgatggactgacctttcgaaggggagtcctgcacacggtgccggacaacaccagacggttggtcatcagaaattactcttcagaatccccagcttcagcatcatcagcggtttcgtttgcgaaatcatcgcgacgctcacggcgctcgtctttcgctttaaccattggagatgcttcggtaacagcgtgcttggtacgcataaccatgctgcggataacggcatcgttgaagcggaaggtagtttccagctcatcgatcacttcctgcggagcttcaacgttcatcagaacgtagtgtgctttgtgcagtttgttgatcgggtaagccagctgacggcggccccagtcttccagacggtggatcttgccttctgcaccagtgatggcagcagtgtagcgctcgatcatgcccggaacctgttcgctctggtcaggatggaccataaaaacgatttcgtaatgacgcatcgaattgctccttacggattattcagcctcctgtctgggtcagccgaatcccggggaggcaaggaacgtgttaaaggtcggctgaaaaatgacgcgttatagtactgacataccccgctaaactcaagggcggagcagaaataaatctcccctttcgcaaataacctctaaaccgctgatttgaagttcatcacattccgtcacagtgttttttcgaacaactgcatcagaaatggtcaccatcaacttctttatcattgattaaaattaaatcagaagatcatcacagaggagagcacacaaagtcagccgtcgaggaggtatctatgttcagtcgagttttagcccttctggctgtgcttttgctaagtgcaaatacatgggcagccattgaaattaataaccaccaggccagaaatatggacgatgtgcaaagcttaggcgtgatttatatcaatcataatttcgccactgaaagcgaagcacgtcaggcattaaatgaagaaacagatgcgcaaggcgcaacgtactaccacgtaattctgatgcgggaaccggggagtaacggcaatatgcacgccagcgcggatatttatcgctagcaccaggtataaccaacgaaacattgccatagtttgctttgcccccttcgcagggggctttttttgaaaaacggctgcggaattagaccagttatctcccgaggaaggaaatttccgcagcgcgtgttttacttctgcccgtaataagcgttagggccgtgcttacgcatgaagtgtttattcatcaggaagctgtcgatgtgattgagttgtggattaatactgcgcgcaatccacgccattttcgccacttcttccatcactaccgcgttatgcaccgcgtcgtgggcatctttcccccaggcgaacggtccgtgctgatacaccacaattcccggcgtatgcagcggctcggcgttgcccagcgtttcgataatcactttgccagtgttcagttcatactcaccctgcacctcttcttcgcttaatccacgcgtacacgggatatcaccaaagaagtagtcagcgtgcgtggtgcctaacgccgggatcgccagccccgcctgcgcccatgcggtggcatgagtggagtgggtatggacaatgccgccaagcgacgggtaacgacggtagagttcgagatgcgtcgcagtgtcggaagatgggcgatactccccttccaccaccttgccgctcatatcaaccaccaccatatcggccgctttcatggtttcgtaggcaacgccgctgggcttgatcaccaccagcccgcgttcgcggtcgatagcgctgacgttgccccaggtaaaggtcaccagcccgtagcgcggcagctccatgttggcttcaaatacctgctgttttagcttttgcattatgccgcctccaccatgcccgctttcgccatgcgcgctttcacccaatcacgcgctttcgccacttctgccgccgggtcttccgccgtttcgctccacatctcaatcaggtacggcccgcaatagccactctgtttgagcgtttcgaaacaacgttcgaaatccactacaccttcgccaaacggcacgtttttgaagacgccaggtttggtgtctttcacatgtactgcgacgatatgcccgattccggcctgcaactccatctgcacatcgttgtcccacgccgacaggttgccgatatccgggtagagctggaaccacggattgttgagatagtgcgcgtagcccagcgccttgctgatggagttcatcaacggataatccatgatctccatcgccagcgtcacctgcgcgcggcttgccatctcaacgctctctttcaggccgtcacgaaaacgacgacgcgtttcgttattggcttcctgatagtaaacgtcatagcccgccagctggatcacgcgaatgccgacgtcctgagcgaactggatagctttacgcataatctccagcccctgcgcccgcaccgcgtcatcttcgctacccagcgggaaacgacgatgagcagaaaggcacattgacggtacgcgtacgccggtttcaacaatcgcgttcaccagcgccagacgctgatcgcggctccagtcgaggcgcgacaggcgctcgtccgtttcatctaccgacatctcgacaaaatcgaagcccaacgtttttgccagttgcaggcgttccagccagcactccccggcggggagcgctttttcatagatgccaagcgggatttgtttggacaacatatccgctccttagccccacagttcggcgatggaacgtttgaactgacgtgcggcttccaccggagaagcggcatcacggatactacggcccgcgataaagacgtgaatcggaatgcctttgaacagtggcagatcttccagcgccaggccaccagtgacggtcactttgaagcccatatcggaaagacgtttgatcgcggtaatgtccgcttcgccccacgccacgcctgcggcctgcgcgtcacggctgcggtgataaaccacctgctgaatgcctgcgtcgcgccactgctgcgcctgttcccaggtccagtagccggtcagttcaatctgcacgtcgccgttaaactcttttgctacgtccagcgcgcctttggcggtgttgatatccgcacagcaaattaccgtcacccagtcagcattggcttcgaagcacatacgagaaagaattttgcccgcatcggcaattttggcgtctgcgagtacgattttgtgcgggtaaagcgctttcagatcgcgaaccgcacgcacgccttcgcccacgcacagaatggtgcccacttcgataatgtcgacttcttcggcaatcaggcgagtggtttcgtaggcgctatccatagtctggttgtccagcgcgacttgcaacatcggtaatgacatcttcaattccttcttaagctgccgcgttggtgcggtcaatgagatccagtacttcctgctcggtacggcaggcacgtaaacggtcgaaattttcttcatcttcaaacaggttgacgatctgcatgatgcctacttcctggtgcgtgttggcatcgaccgccgccatggtgatgaggatatccacagggtcattatcttcgtggttgaactccagcggctttttcagcgtcactagcgcaaaaccggttttcttaacgccctcttccgggcgaccgtgcggcattgccaggcctggtgcgagcacaaagtacggaccgtgctgttcaaccgcatccagaatcgcctggtagtaacgcggctcgacaacatccgccgccaccagcaggtcaacgccgattttcactgcgtcctgccatgtctctgcttcagcctgcaggcggatggatttattctccgccagcgaatcacgtaatttcatggcgcgtccttacttcacgtcctgcgggaaatgctctttgatcacttccagcagtttcgggccaaagtcggcaggagagagcatgttgcgcacgccgaccacgtatttgttgccggtcacggtgatttcgcccgcaatgtgcgtagaagcgatgatgatatccgcgccgctcaactcgcttttgtattcgccaaccgcgcagctgtttaccgtgtggtcaatgtttgattgggttaaaaactggtccactttcatcttcatgatcatggaactgccttgtccgttgccacacacagccagaatacgtacggtcataatcaaaactccttattaagcagactgttctgccagttgtttttctgcatcttcttctgcgcgcagtgcgcggccagcgaagaacatataagccagtgcaattacaatgatgacagccataaaggcgataccgatggagaagaagccctgcatcatcggcggtgccagaatcgaccagtccgccatacccatccaggcactcataccggtaagtttcaccgcccagacgcaaccaaagatttcgatcatccccatcaccagacaaatcttcagcgccgcacgccagccgccgaagtggttagcgaacacgccgatggtggcgttggagaagaacatcgggataaagccgggaataatcaggatcgaggagccgcaggcgaccaggatgccaaccgcaatcagctgaccgatggtgccccacataaagccccagaccacggcgttcggcgcgaagctatagatagccgcacagtcaatcgccagaaccgcacctgggatcaggcgctgagagataccgttaaacgcttcagagagttccgccacaaacatgcgcacgccctgagtgatgatgaagatcgccaccgcgaaggagaaaccggtttgcaggatgtagaccgtccagttcactttgcctgccatcgtctgcacggtgtcgataccgaaggagagcagaatggcgccaaagaagatggtcatgacaatcgccgtggagacgatgttgtcgtggaaaatgttcagccagccaggcagtttgagatcttcaacgctctcctcttttttgcccaggaacggcgcgactttataagcaatccatgatgcaaactgctgctggtgaccgatggagaaaccgcagccatccgtcacttcctgagtcggcttgtacatcatattggaggtaatgccccagtagagcgaaaccagaatcgcggtgcagataatggtcgtccacatggaatagccgaaaataaacaacgtaacggcaatcagccccgcctgctggaacatgatgtgaccagtcagcatgatggtacgaataccggtaatgcgacgcagcagcacgtaacagatgttcagtgccagcgctaacaacaccgcgtaacctacccagctataagcatcgcccatgcgttcaatggttgccatcatcgacgcgtaagtatctgaaatcgcaccgttgatgccgtagacttccgacattttcgccaccaccggtttgaaggtactggtcaggatgccggaccctgcctgcaacaacatgaaaccaataatggtttttatcgtacctttgataataacgctgacacttttgcgcagcaggatatagcccagacaggtcacaatacccagcagtaacggggcattggtcatgacctggttaaaaaacacggtaaagatgttgtagaggatctccataacgatctcctgaagaagaggtaaccgggtattccgcacacccggaatgttgtgcactcactctaattttcaaaagtaatcacaacaagattatttatgattaaatgtggcgcgacccgcaaataattccacacggatagagtgggattcacacaacgaaacaattatttatttaaattcatttagttaatttaactacacattccattaaatctttccacactcaaaatcaacaacaacttccctggcaaaaagtcaaaaaatggtcattgccctcctgaaaaaatagtgtcaggattaatcaaaaccaatcacatattgattcgaattgaactatcatgaaggtaaatggcgatgagtaaagtgaaaagtatcacccgtgaatcctggatcctgagcactttcccggagtggggtagctggttgaatgaagaaattgaacaagaacaggtcgctcctggcacatttgcgatgtggtggcttggctgcaccgggatctggttaaaatcggaaggtggcaccaacgtttgcgttgatttctggtgcggcactggcaaacaaagtcacggtaacccgttaatgaaacagggtcaccaaatgcagcgcatggctggcgtgaaaaaactgcagccaaacctgcgcaccaccccgtttgttcttgatccgtttgcgattcgccaggtcgacgcggtactggcgactcacgatcacaacgatcatatcgacgtcaacgtcgctgctgctgtgatgcagaactgtgctgatgacgtaccgttcattggaccgaaaacctgtgtggatttgtggattggctggggcgtaccgaaagagcgttgcatcgtggtcaaaccgggcgatgttgtaaaagtgaaagacattgaaattcatgcgcttgacgctttcgaccgtactgcactgatcaccctgcctgccgatcaaaaagcggctggcgtactgccggacggcatggacgatcgcgcggtgaactatctgttcaaaacgcctggcggctccctgtatcacagcggcgactcccactactctaactattatgcgaagcacggtaacgaacatcagatcgacgtggctttaggttcatacggcgaaaacccgcgcggtatcaccgacaaaatgaccagcgccgatatgctgcgtatgggtgaagccctgaatgcgaaagtggttatcccgttccaccacgatatctggtcaaacttccaggccgatccgcaagagatccgcgtgctgtgggagatgaaaaaagatcgcctgaagtatggcttcaagccgtttatctggcaggttggcggcaaatttacctggccgttggataaagacaacttcgagtaccactatccgcgtggtttcgatgattgcttcactattgaaccggatctgccgttcaagtcattcctgtaatctgtcgtttataccggatagcgtggagtagttcgcgctatccggcgtagtatttcctggctatttcaaatatcatctaaaaaaatcaaattttatcggaatagctcatgactgaagcacaaagacatcaaatcctcctggaaatgctcgcacaattgggctttgtgaccgttgagaaagtcgttgagcgtctgggaatttcgcctgccactgcgcgacgcgatatcaataaacttgacgaaagcggcaaactgaaaaaagtgcgcaatggcgcagaagctattacccaacagcgcccgcgctggacgccgatgaatctgcatcaggcgcagaatcacgatgaaaaagtacgtatcgctaaagcggcctcgcagctggttaatccgggcgaaagcgtagtcatcaactgcggctccaccgcgtttctgcttgggcgggaaatgtgtggcaagccagtgcaaatcatcactaattatctaccgctggcaaattacctgatcgatcaagaacatgacagcgtgatcattatgggcggacagtacaacaaaagtcagtccatcactttaagcccgcagggcagcgaaaacagtctctatgccgggcactggatgtttaccagcggcaaaggactgacagcagaagggttgtataaaaccgatatgctgacggcaatggcagagcagaagatgctgagcgtggtagggaaactggtggtactggttgatagcagtaagattggcgaacgcgcgggaatgctttttagccgtgccgatcaaattgatatgctgatcaccggcaaaaatgctaacccggaaatcctgcaacaactggaagcgcaaggggtcagcattctgcgtgtttaaagatgctggcggaaaaatgtcactgcagcatctaacgcctcaggcgtaatgcggtgacgcacgcctggctgccatgaacaggttagcagtttatcccgtcccgtctcgcttaaggcctgctgcaaacgtagtgattcgtcggcaggcacaacgtcatcgtcgaggccatgccacagcagtagaggtctgtcactaagttgttccaggtggtttgtcgcttcccactctgccagcggcgcgacaatgttattgaattcattctgctgtgctgtcgtttcaggtatcagcggtggaaacagtgaacgggcgagtgatgtaaaatagcccgatcccatcatgctggcggtacatctcaccgtggggtggcgagcggtaatccccagtgccgtcatcgcgcccatcgacgcaccaccgactgccagacggtcatcaagcagccacttttcttcggctattgccgcacgtaaagtagtgaattcctgcatactttgtagcaagatttgccagaattgatttaaccgccgcgctgcgtcgccactaaaacgactaccgtgatcgggcgcatccggcatgatcacccgcaaaccagcctgcgccagcgcaacggcaaaatagctatacaccagactggacgaagtaaagccgtgataaaaaatcgcgcacggtaacggggtatctttttgtccgacaggataagcatgaagaacgggaatatctgccagctcgcgtgattctatttcaatcatctgtctctcctttttgtctggtatgacatgaagaaatccttagcacaagtttctgctggcggtattagttcataatgttgagatgtgggttacgctttcgtcacgttttcattcgaaaatcgcgtaccaggtaacaattcgggaacattcccccaaagttaaattaataaggcactacactatggttagcaggaaacgtaatagcgttatttaccggtttgccagtttattattggtgttgatgttaagtgcctgtagcgcactgcaaggtacgccacagccagcaccgccagtaacggaccatccgcaagagattcgccgcgaccagacgcaagggttacagcgaataggtagcgtaagcacgatggttcggggttctccggatgacgcattagcagaaatcaaagcgaaagctgtcgctgcaaaagctgattattacgttgtcgtcatggtggacgaaaccatcgtgacaggacagtggtattcacaagccattttgtaccgtaaataaatcagacaacttacatagtcagctttacattgctttgcgtccctatgcgtttacctgtgcacaataaattaccggctggaagcctgggcgtttattaccgcgatggaatgccctgcaacatgtggggaaacgaaaaatggagctgacgatgaaacaattacttgcctcaccctcgctgcaattagtgacttatcctgcgagcgccacggcacagtctgcagaattcgccagtgctgactgcgtgacgggcctgaatgaaataggtcagatctcagttagcaatatttcaggggatccgcaggacgtggaacgtatcgtggcgttaaaggccgatgaacaaggtgcgtcatggtaccgcattattaccatgtacgaagaccagcagcctgataactggcgcgtacaggcgatactgtatgcatgagtgtcatctacagcaaatgaacaatgccggatgcggcgcgagcgccttgtccggcctacaattttcacatatttcatttagttaatcgaaaccagcgtcgcatcagtcgtatacgcttacacacacactccccccgtcgcccgcagcaataaatcattctggatctgctctgacaaccgtacgccgccgcgcgtatctaacatcacctgacaccacgcctgcgccattggcggagaagcatatttcaacatttgcgcaccgcagcccagcaggaatagctgatgagtaatctctcgccccagttcttcagctggcttacgcagctgctgctgtaaacgacgaaccgcgcgatcaaaatagcgatcctgccctttcacttccacaaatgcttccgacaataagtcgtatacgcccgcttgcttattgagaacgcgcaacacatccaggcacataatattgccggaaccttcccaaatactgtttaccggcatctcccggtaaagccgcggcagctcgctctcctcgcaataaccaatgccgcccagcacctccatcgcttcggccacaaacggcatacctcttttgcagatcacaaattttgccgcaggcgtaaataaacgcgcccacagggcttctttggcatcggcacgccggtcccacgctcgcgcaagacgaaacagcaacgccgtttgcccttcaagctgaagtgccatgcgacttaagacatgacgcataaggggctgttggatcaatggattaccaaaaacatggcgttgatgtgcatgataaatcgccagcgaaaatgcacggcgcatcatggcatggctacccagggcgcaatcaaaacgcgtcatcccacccattttcaggatcagacgaattccttccccttcctgccccaacaaccaaccaatggcatcctgaaactccacttcgcaactggcgttagagcgattacccagcttatctttcagccgctcgaggcgaatcgcgttgcgttgcccgtcaggcaaaaagcgcggcacaaaaaagcaggacagaccacccgcggtctgcgccagcaccagatgcgcatcgctttgcggaaccgagaaaaaccatttatgccccaccagccgataagagccatcttccagacgctctgcacgggtggtgttgctcataacatcggaaccgccctgcttttccgtcattcccatgccaatcaacaaaccgcgtttttgcccacctggcaataagtgagaatcgtagcgatcgctcaatagcggcgtggtccagtcctgaaacggcgcgggtaacatctgtaacaacaatggcgtggcggcaaaggtcatggttatcggacataacgaccctgcctcaacctgcgcatgtaacataaaacgcgccgcgcgcgccacaaatgcgccggagcgagcgtcttcttcccaggcaagattgtgcacccgattggtacatagcgcctgcatcagcaggtgccaggcggggtgaaaacgcacatcgtccagacggcgtccttgcgcatcgtagcgcaataattcaggcggattcacattcgccagccgccccagttcaagggattcagccgttcctaactgctgaccaatactggctagaaaatcgctatcccagccagcaccttcacgcgttaccgcttcgcagagcgcgccatcagacaggtataagttgctgttatttaatggtataggttgattaaaaacggtgtgagtttgccagtgcactgtgtctccctccatcaatggcagtcaccattagtatggtcactgccatggattcatgacagaaagagattgctaaaacattcttatccagcaatgtaatgcggaacgaaacgtgaggtgtctttggtgatcagtgtgttatcttcacggatccccattccgcacgcttcatcatcgacaatccagctaccgatgagtgtgtagctatcgccaaaccgcggcagaggttgaaacgcctggtagatcatcggttcatcggcgtaatcaccatcagcgtggtcaacgacgttattctggccgtcgaaaatggtgacatttccgccttcgcgcgagtagagcggtttacgcacatagctttcgccagcggcaatctgcgatttttcaccctcaaaccaggatgcaagaaggttaggatgaccagggaagaagcgccaaagcagcggcattagccctttattactcaagatacttttccataacggctccacccattgctcgcgacgcttgcgcagcagcggaccgttatcgtcacgcatcatccactccagcggatacagcttaaatgcacgctggatgacattatcatcaagatcggtcagtacgccgccgacgcccaaaccgagatcttcaatgtagataaaccgcgactcctgccctgcctgctgggcgcagtcctgcaagtacagcacggtactcctgtcttcatcggtgtcctgacagcagcaaaaataaaacggttcccgactgtaaagctcgctaaagcgtgaaatcaggcgttcctgaatagcattgtactgatcggcatcacgcggaataatgccgctgcgccgggcatcctccagccacagccactggaaataagccgactcgtacaatgaagttggcgtatcggcgttgtactccagcagcttcaccggcgcattgccacaccaggcaaaatccatccgtccatacagcgaaggatcgcgggcgcgccagctttcagcgatcacatcccagtacaacggcgggatcgccagttgcgtcaggatctcttcatcttttaccgcgcgatccaccacctcaaggcacatctgatgcagttccgcagtcggtttttcgatctgctcttcaatctggcgcagagtaaaacggtaagcccgactctcatcccaatagatttcattgtcgatgatatgaaagtcgaaaccgttgtcagcggcgatctggtccagatcccgtcgcacaggaacgttgtgtctcagcatgattagcctccccaatgcccacgggcgctggaagaacgaccatagccgccgcgagaaacggtagacgcttttttggtggtaaagccgcccgaagagtaagactcttttttgccagaaccggagcgccaagagtaatcaccagaagtgctgcgccagactgggcgcgaagcaaaagaggaaccgccgctgttataaacaaacggctcatcgcgatctttacgaataacccggcttaacaaaaatccagaaacgaccgggatccaactctgttcaacattgtcgtagtagcaattttcgtacttagactgacagttctgctgagtcatattcttcggaacatcggcataaaatgccgttttggcgttgttccagccacgcgcgcaaatgtcggcattattaccgtcatcaatacaatcctgcactgtcgcgtaaaacgttccgtcgccgtcgttatcgacatcgctactatcgctacaacctttcaatacgaaaaaagcggcaccgcccattagcgccaacgttaagtatttttgtgcgtagcgattgcgacgcggttcaaaaggattattcggtctaccaatgcgactaatcgctccgtgaccaattttactgttatttcttgatttgcgttttctggccatgatcgtccattaccatgtcatacaagctgcgttaaaaataccgccagccagcgcggcggttcccataaacattcctgctgcggtattgtgattaataattttttcgcttaatgcgggcatataaagtctgacaccagcaaaaacgagtaactgaatcaccagtgcaatcccgccccaggcgaaatagtctggaatactcaccgcattgattgccgcactggataaggggataacgtaacccaacaatgtaccgctgaacgccagtgacgccgcggtattattgtttttgattaactgccattcgttgtgcggtgtaattttagaatagataaacagaaaaataatcaccatagccacgccaataaaaaaataggcgctaaaggcaagaagtgaatccagtatatgcattgtaaacgtccttgtaattaaccaataatatgaagtgatgtcagcgggatatcgacacccaacgcgcgcgaaaataaccactctggctcgccgagatcgttaaaagattcctcaccatttagcagcaaatattcgtaagtatcttcggttacttgccgttggtagcccatggtaaaattatggacctcccatttggcatggttttgattttctactttttccagcatgtagacgggttcgatatttcccggttcttcgctgttaaaaaatcgctgccagcgtttttcctgccagtttaaggtcattgctcccatcgctttggcgttgatcgcctcgcgccagtgactctctttactgataccgtagctctcttcatagacaaagagcttgatatcatcaatgtcatcaatatcttcgccgccggtggtattgatttgcagaaactcatcgcctgaagtgtagtagcggaaaatctgactaccgccgcccagatcgatgtggctgacggcggctaccgtaaattcctcacccggcagcgcaatcagcaattcatcttccagcaaacgaaacgctaacgtgtcgagcgtaaagccactattgagatgaagtcccagcggaccacgagcgatagctggcttattatccttgccaaacagacgctggaaaaaaccagacatattttatccttaaaatagttgccagccttttagcgaggctggcaaaaaaattactcgccctgttggcgttgcagtcttgctaatacatcctgggcgctacttttattgctaccgccaattccggcttccgccagcttttcgtcaaggtcgcgaccgtctgcgactttctccaactgtgcggcagcatccaggcgagcctgacgttcggcctgacgcgtttgcaggcgttttaaggattctgccgctgtcgaaacgctggaagatgcgccaacggtagaggttgttacagcctgttgtgcacgctgcatggcttcagtggctttaacgacttccatttgctgctcaaactgagcgatacgctgcgctgtcgctgtaactgctttttccacgccatcacgggagacttccagattcgacaacacttgctcttcagcggtaatgagattctcaaggcgcgcgatttcttcagcaacttcgttaatcaacgacggattaacgttcttgcttaacgcttccagcgcacgggcttccagactggctttgcgctcacgtaaatctttcagcttatcgtgacttaatttcacccgcgccagcagatcaacgcgagattttccggctttatcgagttcagctttagcgtcacgaatatgctgttccagcatgcgcacgccctgggtttcttcaatggattcttccgcctgggagataaacgatttccccagcgtaaataaactttttaaaattcccataaatacccgtccttgtaattagtgtgaatattcttctgtaatttcagccagatccaatgcgttatctaccagcgaggttatctcaagcaggatatcttcaagagaagatttaagcgataacgccccgaaaacaatgtaatactcttcctgttgtacgctggagatccctaccgatgacaacggcatcatcttctgatttcttaataagaaggtattaaattcatctggattgctgatactactcaccggacaaataaaggtttcgataatcatttggcgggaagtaaaaagaatattgatttgcaaatcgccataatcattcattttaataattaatgcgttctcgctatttgttacatcaatattttgttcaggtacagtttgcagcgccgtcgctagcgccaacggattccatgtcatatattattccatatagattaagtttaaatattaataaaatgaatatttgcaatacgtaattatcttaccagctatagacaaaaaaaaaccatccaaatctggatggcttttcataattctgagaaattagctgcgctggcgcaccgcttcaaataagcaaattccggtcgcaaccgaaacgttcagggaagaaacgcttccagccatcgggatgctgatcaactcatcgcaatgttcacgagtcaggcgacgcataccttcaccttccgcacccatcaccagcgccaggcgtccggtcattttgctctgatagagtgtatgatccgcctcgcctgccgtaccgacgatccagatattctcttcctgcaacatacgcatggtgcgcgcaaggttagtcacccgaatcagcggaacgctttctgccgcgccgcaggctacttttttcgccgtagcgttgagctgtgcggagcgatctttcggcacaatcaccgcatgaacgcctgcggcgtccgcactacgcaggcacgcgccgaggttgtgcggatcggttacgccgtcgaggatcagcaggaacggttgatcgagcgaagcgatcagatccggcagatcgttttcctgatactgacgtcctggcttcacgcgggcgataatgccctgatgcacggcaccgtcgcttttctcgtcgagatattggcggtttgccaactggataaccacgccctgagactcaagggcgtgaatcagcggtaacagacgtttatcttcacggccttttaaaataaagacttcctgaaaacgttcaggggcgcgctccagcagggcctgcactgcgtggatgccgtaaatcatttcgctcattaatgtactcgttgtttacgttttgcctgatgcactacgtttatccggcctacatgatctctgcaatatattgaatttgcgtgattatgtaggccggataaggcgttcacgccgcatccggcatgaacaaagcgcattttgtcagcaatctaaccctcttcttttaaagagggtattgatcactctgccacttttttcttcgccgcacgcttcgctttggtcgctgcagctattttctgcgttttcgccgatggctttttcgcttttctcgcgtctttcttcgccgctttcggcttcgtttttttctcaccgcggaaggcgctgtctggctcaaagtttacctttttaccgacctgacgacgcttgccgccttttttacctgcatcgccttttttcgctttctcgcgcgccgttttaccgacgttgcgcggtgcgcgttcgctggagatcaggctaaagtcgattttgcgctcgtccatattaaccgcttcgacgcgaacttccacgcgatcgcccaggcgataagtctggccgctggattcccccatcaggcgttgccctacctggtcaaagcgatagtagtcattgtccagcgaagagacatggaccagaccatcaatgaacaagtcgtccagacggacgaagaagccaaagccagtgacgctggaaattacgcctttaaagacgttacctacctggtcgagcatgaagtcacacttcagccagtcagccacatcgcgcgttgcttcgtcggcacgacgttccgccatcgaacagtgctgacccagttgcagcatctcttccatcgaataatggtagccgccggtttcagtggtgttgccctgatgcccctgctctttcgccagcagatatttaatggcgcggtgcagcgtcaggtctggataacgacgaatcggcgaagtaaagtgcgcataggactgcaatgccaggccaaagtgaccacggttttctggatcgtaaatcgcctgtttcatcgagcgcagcagcatggtttgcagcatttctgcatcaggacgatcggcaaccgactccagcagctccgcgtagtcacgcggttccggcttgttaccgcccggcagttccagccccagctccgccagcactgaacggaaagaggtaatcgcttcggtgctcggcttgtcgtgaatacggaacagtgccggttctttcgctttctcaacgaaacgcgccgccgagatattcgccagaatcatgcactcttcaattaatttgtgcgcgtcgttacgctgggtctgttcgatacgttcaatacggcgttcagcgttgaaaatgaacttcgcttcttcgctctcaaatgagatcccaccgcgttcttcacgggctttatccagcactttatagaggttatgcaactcttcgagatgcttaaccagcggggcgtactgctcgcgcagatcctgatcgccctgcagaatatgccagactttggtgtaggtcagacgcgcgtgagagctcatcaccgcttcgtagaatttgtagcccgtcaggcggcctttcgacgaaaccgtcatctcgcacaccatacacaggcggtctacctgcgggttgagcgaacacaggccgttagagagcacttccggcagcatcgggataacctgcgaagggaagtacaccgacgtgccacggttacgcgcttctctgtccagcggcgttgacggacgcacatagtagctgacgtcggcaatcgcgacccataaacgccagccgccgccgcgttttttctcgcagtaaactgcatcgtcaaagtcacgggcgtcttcgccatcaatggtgaccagcggtaaatcgcgcagatcaacacggcccgcttttgcttcttccggcacttcttctttcagcccggcaacctgttgctcaacagcctgcggccagatgtacggaatttcatgggtacgcagagcgatatcaaccgccatgccggtgcccatattgtcgcccagcacttcgacgattttacccaccgctttggtgcggcgagtcggacgctgagtcagttcgactacgaccacaaagcccatccgcgcgcccatgatctgatcgggcgggattaagatatcgaagctcagacggctgtcgtcaggaaccacaaagccgacgcccgcttcggtaaagtagcgaccaacaatctggctggtttttggcaccagtacgcggacaatacgcgcttcacgacgacctttacggtcagcacccagcggctgagccagcacctgatcgccatgaatgcaggttttcatctgctcgctggagagatacaaatcatctttacgcccttcaacccgcagaaagccgtagccatcacggtggccaataacggtacctttcaccaggtcgaggcgttccggcagcgcatagcactgacgacgagtgaagaccagttgaccatcgcgctccatcgcgcgcaggcggcgacgcaggccttcaagctgctcttcgccttcaatgtgcagttctaccgccagctcatcacggctggccggtttttcacgtttggttaaatgttcgaggataaattcccgactagggatgggattcgcgtatttttcagcttcgcgttcctggaaaggatcttgtgacatctcggttcctccgttgtcatctctgatgaagattttcgtcactccaccagcaataatttataaagcggttgattctcttcaaccaaatcggcaagcgtgtagttatccagttccgtaagaaaactttgcacggccttagaaagtgcctgtttcaacctacaggcaggtgtaatgtggcaaaactcactgctgcaattcaccagcgataagggctccagctcgcgcaccacatcaccaatacgtatcgcactcgccggtttacccaggcgaatgccgccattttttccacgaacagcagtcacgtagccggcacgactaagttgattgattattttgaccatatgattacgggagacgccgtagacgtcagtcacttcagaaatactggtcatccgcccttctggcaatgacgccatgtagatcagcgcacgtaatccgtaatcagtgaaactcgttaactgcacatcaacctcaaaagggaaatcgggaaaaaatacatttatattgatgataaaccagccacaagctgtgtcgctaatttatttcagttcggggaaggaaaaaagcgaggatttaacactgtgtcggatagcgtaatggcttacccgacacagcaatgtatcacactgttcgcccggcaggcaaaatatctgccaggcgtaccagaattacgcgtcgaacgggtcgcgcagaatcatggtttcagtacgatccggaccggtagagatgatatcgatcggcacaccagtcagctcttcaatacgcttgatatagttcagcgccgcctgcggcaggccgctacgatctttcacgccgaaggtggattcagaccagcccggcatggtttcgtaaatcggctctacacctttccagtcgtcagctgccagcggagtggtagtcacttcgcgaccatccggcatacggtaagccacgcagagtttaacctctttcaggccatccagaacgtccagtttagtcaggcagaagccagacagggagttcagctgtaccgcacgacgaacggcaacggtgtccagccagccggtacgacgacgacgccccgtagttgcgccgaattcgttaccctgcttgcagaggaactcgccagtttcatcaaacagttcggtcgggaacggacctgcacctacacgagtggagtaagctttgaggatacccagaacgtaatcaacataacgcgggcccaggccggaaccggtcgccacgccaccagcagtggtgttggaagaagttacgtacggataagtaccgtggtcgatatccagcagcgtaccctgcgcaccttcaaacatgacgaaatcgccacgctgacgcgcctggtcgagcaggtcagaaacgtcaaccaccatagaagtcaggatgtcggcaacagccatcgtatcatccagaactttctggtaatcaaccgcttcagctttgtagtagttaaccaactggaagttgtgatattccatcacttctttcagtttttcagcgaaggtttctttgtcgaaaaggtcgccaacacgcagaccgcgacgtgctactttatcttcataagcaggcccgataccacgaccggtggtgccgatcgctttcgcgccacgcgctttctcacgcgcgttatccagcgcaacgtgataatcaaggatcagcggacatgcttcagacagcagcagacgctcacgaacggggatgccacggtcttccagttctttcatctctttcatcagcgcggccggagacagcacaacaccgttaccgatgatgctggttacattctcgcggagaatacctgatggaataagatggagaacggttttttcaccgttgattacgagagtatggcctgcgttgtgaccgccctggtagcgtacaacatatttagcccgttcagtcagaagatcgacgatcttacctttaccttcgtcaccccattgggtgcccagtacgacgacgttgttacccatttttcaaaatcaccgtttgcttaaaaatggattctaccatcgctttttcagagttacagcactttttgcactcaaaaatgacctcgatcagtctgttttttgttcagccaatcgttttcctcaacatgtagtagaccacaacgcccgcaaccacaagtccaccgccaaaacgacgtaaaatattatcgggcaaattggtcatcgcagagatcatcttcttccatgccttcgggtaaagcatcggccctaaaccttccagtaccaaaaccagggcaagcgccagccagattgtcgaattcattcattatccttatagaaaaagaaaaccaccgacatccctgaggatgcggtggctttattgacctgtaccgcagtcgttatattaacgcgttgcggaagtcggcgtcttcatgtagcggaagaaatcgctatccgggctcatgaccatcacgtcctgattgccagagaagctgttctcataagcacgcaggctacggatgaatgcgtagaagtccggatctttactgaatgcatcagcaaacagtttggctgcttcggcatcgccttcaccacgcatgatacggccctgacgctcagcttctgccagcgttctggtcacttcatagtcggcagtcgcgcgcagtttttccgcttcttcctgaccttgtgaacggtgacgacgcgctaccgcttcacgctcggcgcgcatacggttgtagatcgcttcagacacttcggtaggcaggttgatctgcttaattcgcacatcgacaacttcaatacccagcgccgccatactgttcgggttgatgaccggaactttgcccttcgtctcagccgttacgcgctctgccgcttcggcaatggcgttatctgccgccggggtagtaacttcatcttctgtacccgcagaaccggagttcagcgcgtcacgtacttcgagggtcagacgaccacgggaatcggtgacgatgtctttcacgtccaggcgaccaatttcagaacgcagacggtcagagaacttacgtttcaacagcacttccgcttgcgaaatgtcgccaccacccgttgccaggtagtaacggctgaaatcgctgatgcgccatttgatgtaagagtcgacgatcaggtctttcttctctttggtcacaaagcggtcggcctggttgtccatggtctgaatacgtgcgtcgagcattttcaccgtttcaatgaacggtatcttgaaatgcagacccggctcataaaccagaggtttgttgtcatcgtcacgcagtaccttaccaaaacgcagcgtaataccgcgctcaccttctttgacgacaaagacagacatgtaaagcactaccagcacgatgatgataatcgcgataactgacttacgcatcgttattccccctgacgctggtagtcgttacgctgcgcgttggcgcggcgttggtccataatatcgccctgactggtggacgacgtgttgcttgctccactggttgtggaggaagaggctggcggcagacgcagcagattgctggcaccgttatcgctcttcgccgcaggggcgttaccacctttcagcatctggtctaacggcagaaccatcaggttgccacctttatcgttaaccagcactttgcgggtgttgcccaacactttttccatcgtctcgatatacagacgctcgcgagtaatttccggcgcggctttatattccggcagaagtttagcaaagcgcgccacttcaccctgggcttccaggatggtctgggccttgtacgcacgcgcctcttcgaggatacgttgcgcctgaccgttcgcacgcggctgaacttcgttggtatacgcttctgcttcacgaatgtattgctgttcgttttcacgcgcggcaatcgcatcgtcaaacgccgcttttacttcttccggcggacgagcagcctggaagttgacgtccagcagcgtgatacccatgtcatacggacgaatcgtctcttccagttcgcgctgagtatcgctacgaatcacggtacgaccttccgtcagaatgcggtccatggtgtatttaccgataactccacgcagggcgctgtcggtagcctgacgcaggctgtcatccgggctggtcacgctatacagatatttttccggattggtgacgcggtactgcacgttcatctcaacgcgcactacgttctcgtccgacgtcagcatcacaccagaagcggccagttcacgcacggcttccacgttcaccggtttgacttcgtcgataaacgtcggtttccagttcagacccggctcaaccagatggctgaatttaccaaagcgtgttaccacgccgcgttcggcttctttaatggtatagaaaccactggccgcccagataatgacaatcgctgccgctgcgatggtaacgacacgaccgccaagctgcgggcgcgggccttgcgatgaactgccaccgccagatccggtgcctttaccgccgcccagaccaccgagctttttgctcagtttgcggaagatatcatctaaatcaggtggcccttgatcgcgaccgcctttgtttccatttccctcagagttgccgccaggtttgctgcttccccacgggtcgcggtcttgtccgttattaccgggctgattccacgccatgtttgtgctccatatttgttatgcggtgatccctgttgtctttcgacgccagaggatatgactccacgcttcagacgctacgccgttagatcaggtaatcgatcaacgccggttcttgtttacagaggcgacgccagtcaacgatcggcatacgaacttgcagacttacgctgccgtcctcctccatccactctttttctattgcctgaagctgataaaaacgacttctcagacgcccttcctgcggtggcagacgcaatgtatgctgcgccacctcgccggaaagccgctccgtcaaagcctgaaaaagctgtggtatccccgctccggtctgtgcggaaagccagacacggatcggtttgttctcttcgtcccgatcaatacgcggttcgaaatcttccagcatatcgatcttgttcatcaccagcagggttgggatctcgtgagcgtcgatctcttcaagaaccgtattcaccgcttcgatgttttcttgtacacgcacatccgccgcatcaatgacgtgcagcagtaatgtggcttgccgcgtctcttgtaacgtggctttaaatgccgccaccagatcgtgcggcaggtggcgaataaaccctacggtatctgcaagtacggtttcaccgacatctgcaacgtcaatacgccgcaacgtcgggtcgagggtggcaaacaactggtctgccgcgtagacccgcgcttcggtgatgcgattgaaaagggtagatttaccggcgttggtatatcccaccagcgaaacagtaggaacgtcggctttgatacgcgattgccgcccctgctcacgctgcttttcaactctttccaggcgcgactgtatctgcacgatgcgattacgcaacaaacgacggtcggtttcgagctgggtttcacccggaccacgcaaacctatcccgcctttctgtctttcaaggtgggtccagccacgcaccaggcgcgtagccagatggcgcagctgcgccagctcaacctgcaacttaccctcatgggtacgcgcacgttgggcgaaaatatctaaaataaggccggtgcggtcgataacacgacactcgcacaaacgctccaggttacgctcttgcgccgggctcagggcatggtcaaaaagaacgaccgaagcacccgtcgctttgacagcttccgcaatttcaactgctttaccttcacctacaaaatactttgggtgcggcgctttacggctaccggtaatcacctgcaatgcttcgacaccggcggaagagaccagagattcaaactcctggaggtcttccatatctttgtcttgcgtaaaatagatgtgtaccagtaccgcctgctcaccagcatcataacggtcaaacaagcgtataaccctctaaatagatcagcggggaacgcaggatcgctggctccccgtgtaaaaaaacagcccgaaaccttattcggtttcttcgctgtcctgttgcgcggaagtattctgcgcgctgctaccatgatggtagttactgctggtaccgccaccggcgttgttactgtgatgagaaaccgggcgagacgggacaacagtagaaatcgcgtgcttgtaaaccatctggctgaccgtgtttttcaacaggatcacgaactgatcaaaagactcgatttgcccttgcagcttaataccattcaccaaataaatagaaactggaacacgttcccgacgcagtgcgttcaggaacggatcttgtaaagattgccccttagccattctctcttttccttatatgcttatttgtactttgaacctttcgattctgaaaaaattgcgcacgatacgtctcaattgtacacattcagcctgcgatagcaccaacaacctgtaatacttcgtcacgcgcctgttctggtttttcactgtcaagccagtgaaccccttcccaaccacgcagccaggttatctgccgcttcgccaactgtctcgtggcgcaaacacctcgataaaccatttcatcgtatgagatttcgccttcaaggtaagaccacatctggcgataacccacgcaacgaatggaaggcaagtccgtatgcaaatctcctcgggcaaaaagcgcccggacttctgcttcaaaacctgaagccaacatctgatgaaaacgctgctcaatgcgttgatggagcagttcacggctcgccggggcgatggcgaactgatgcacctgatacggtagagcgtctcctgacgtttgcgtcagttccgttaaagttttacccgaaatgaaaaaaacttccagtgcccgggaaagcctttgtggatcatttggatgaatccttgctgccgcaaccggatctacctcctgaagttgacgatgcaatgactcccaaccttgctctgccgcctgttgctcaattctggcccgtacttccgggtctgccgacggtagcggcgacaacccttccagcaatgccttgaaatacaacatcgtaccgcccactaacagtgggatccgccccgccgcggtgatatcggccatttccgccagcgcatcgcggcgaaaatcagcagccgagtaagcctgcgacggatcgcgaatatccagcaatcggtgcggcgcggcgagtaactcttcagcgttcggcttcgccgtcccgatatccatccctttgtaaataagggcagaatcaacgcttatcaactctactggtaaaattttacgcagctcaatggctaacgccgttttaccggaggccgtcggccccatcaaaaaaatcgccttaggcaggctcgccttactgatatcactcatctttcagggcttttatcgccggatgtaaatcaacagattgtaacagaccacccggcggcgttttcacaagttgcggacataactgttccacgtccgccagcagggttatggcctgtgccattgaccactgcgcatgttcgctcatcagatttcgtgcaatccactgcgcaatattgccaggttcgaatacggactgcttcgccaggtagcctatcagttcaggaatcaagatttgtaaattttgttggcgtaagggtaaaggcactgccctgatggtcacatgctgtgcatctgactggaaatcaatacccaattccgccagggcagactgcgctttttctaatgccgatttttcttcggcagaaacttttagccgcaacggaatcagcagcggctgggcgcaaacgggcgcttcacccggcgtcaattgtgcctgacgcagccaacgttctgccactggcaaggataaaagtgaaatgttgccgtcgcgctccagcaacgcacagtcggaatggacgatagtcagtacccgaccaaaactctgactgttcgccgcaagtgcaggttcctgcggttccggcgcttttaatttttgcatcggcgcgggcgtttgcaaaagctggcgatacacttcaccttgctgtttctggtagcctggctgcgcattcggccagggggcagccggacgactgcctgatgctggcgcaggagtgtagcgcggagctaccggctcacgagctgccggttctgcaaagtgattgcgccccgccgccacgcggttttccggaatggaacgcggtgcaggttggggttcatcgtccagcggtagcggcgtttccagttgctgttgtagcacgctcagcacgccctgatagataaaatcatgcaccagacgcgactgatggaaacgcacttcgtgtttggcggggtgcacgttgacgtccacctgatgcggatcgatctccagatacagcacaaatgccggttgctgatcggcccccagtttgtcttcgcaggcctggcggatcgcgtgattgatcaggcgatcgcgcatcatgcgaccgttcacgtagcaatactgaatttctgccagtgcgggcgtggtgtgatttggatcggccacccagccgcgtagcgtgagatcgccgtgttgccattcaatcgccagcgcttgttcaagaaaagcggtgccgcaaatcgcgcctaagcgccgttctttttgcccgccttccggcactgcgcggtactgacgcacaattttaccgttatgcgacaggttgatcgtgacgtcgaaacgcgccagcgcaatgcggcggatgatctcatcaatgtggttaaattcggttttctcggtgcgcaggaatttgcgccgcgccggggtgttgtagaacagatccagcacctccagcgtcgtccccacaggatgcgccgccggttttaccgtcacgttcatatcgcgcccttcggcataggcctgccaggcttcctgctgttctgcggtgcgtgaagtgagcgtcaggcgggaaaccgaactgatactcgccagcgcctcaccgcgaaagcccaggctgataatggcttcgagatcgtccagagaggcgattttactggtggcatgacgcgccagcgccagcgccagctcgtcttttttgataccgcagccgttatcacgaatgcggataagtttcgccccaccgcgttcgatatcaatatcgatacgtgtcgcacctgcatcgaggctgttttccaccagttctttgactaccgacgcaggtcgctcgaccacctcacctgcggcaatctggttcgccagttgtggcggtaagacctgaattggcatcaatcgtccttagtttggcagcgtgcgatctggcgtcgtcaccgtactggcagtttgtgccgttgccccctgcggcgcagattgcatcggatgcgcaaggaaataattgcgcaggcctttgtaaatggcttctgccagctgttgttggtaatcgtcgctcgccagcaaacgttcttcgctgttgttgctgataaaaccggtttcgaccagtactgacgggatatccggcgaacgcagaacgccgagactcgcgtgttctggtcggcgtttatgtatttcgccaatgcgttgcaactgactgatcatactggtcgctacatcataccctacccgctgggaatgaccgaactgtaaatccagcaccgcctggcttaaataggggtcagactgactgttcgccagcacatcacccgccccacccagcagctccgactgtttctcgtgctgctccagccagctggccatttcactgttggcacgacggttagagagcacccatacggaagcgccagtcgcactgcggttcggtgcggcatcagcgtgaatcgacacgaggaaattggcgttttgcttacgtgccacatcactgcgccccatcaccgaaataaagtaatccccgtcacgggttaaaacgcctttaaacatcggatcgtcattgagcaaagtgcgcaatttacgcgcgatggcgatggtgacatttttctcccgcgtaccaccggggccgatagcgccagggtcctgaccgccgtgtccggcatcaatagcgatgataattttatcgccagtgttagccgtcgcgcgcgctgccggacgcgttaccgtattactgctgataacacccgtagtgcggttactttccgttttaaacggattgcgcgccggttcgctgacgcgcggtgcgacaaccgcaggcgtttcaacgcgtttcgcaaccacgggcggcggaggaggcggtggcggcacatcggcgttaatcgtaaagacgacattgtaattgctgccattctgccgcttcaccgcttcggttttaccgttttcggtaagatcgaccaccagccgtagcgtttgtgcatctttaggcgttccagagcgaatcgccttcaccagattattgccgctgaacaacaacggcagtccctgaatcacgcccgtttgtttgatatcgagcgccacggtgcgtttgctttgatggctaaacgcataatcaggatcgccaataaaactcaacgttatccgcgcctgttgattaccgttagaaacctgaatatcagagagcgtcgcggcacccaccggcgtgcacagcagcagcaacgtcgctaccaaccaatttctgatgcgatatatcatcccgccacctttcaaaggttaaccggctaaacgcgccagcaacaattcacccgcagaggaaactgcactcacgcgcgcctcacggccttgtgcctgataatcaatgtgtatttcgacatccgggtcaggaagaacacctgtaccttgttgtggccactccaccaggcagatggcatcgttggcaaaataatcgcggatccccataaactctagctcctcgggatcggcaaggcggtacaaatcaaagtgataaaccattaaattgtcgagcgtatagggttcgaccagcgtataagtggggcttttgacattaccctgatgacccagagcttgtaaaaagccccggctaaaggtggttttacctgcgcctaaatcgccatacagatagattacggttgcgccatcgcaggctttcgctacccgctcgcccaggtctaatgttgcctgctcatcagggagcggaattactcgattcatcatggtttttatcagtcacttccgggttaacaatacgctgtagcgtggaaaagagatcggttgccagcatcccgcgcgttccaaaacgcgccgccagtacgtcagctgccgcaccgtgcgcaacacagcctgcacaggctgcatcatacggcgacagtttttgcccaagcaatgcgccaataataccagagagcacatcgcccatgccgccgctcgccatgcctgcatttccgacatcaataatgcctaaagcgtcaggatgggcggcgaccacggttccggcacctttcagcaccgctacgccgccataacgttgtaccagacgtttggcgcaatgtaagcggtcactttcaatttcagcgacggaacagcctaacaaccgtgcggcctcgccaggatgcggcgtgatcacgcgattgtgacgcttatcgggattgattgccagcaggttcaatgcatcggcatcccacaacatcggtttgcgaaaattctcaactttttgcagggcttttttcccccactcttgctggcccagaccgggaccaatcaccaccacatcggcccattccaggctttcggcaagagagtccatcgtcagttcatgcaccatcaattctggtcgtgcagtcagcagcggcgcaatgttttcactgcgggtcagtactcggactaaaccagcaccagcacgtagcgccgcttcccccgtcatacgaatagcccccgcagtgccgtgatcgccaccgataatcaccagccgcccgtgatcgcctttatgcgaagtcgggcgacgcggtttcagccagtgagaaagttgttctgccgaaaaccgctgaattttcgtctcctgacctgccagccaactatccagccccagtgagtcaaaatgcagttgtcctgtaacatcccgcgcttttccggtgagcaagcctggtttcagcgcaataaaagtgatggtgtgatcggcgttgatcactgcgcctggcgtagcgccggtttcagccagcaggccggaagggatatcaaccgccgcaatcggcgcaggatgggaattagcgtggtcgattaactggctaatggattcgcggggcgcttgctgcaagccggtaccgagcagcgcatcaacaatcagatctaccgattcgggccagacaatattcgaagcatggatctcgccacccgcgtttaaccatgcttcgcgtgccagcgcggcctcttccggcaacggtttgtcactttcctgggccagcagcgtgacctcaataccgaccgctgtggccagccgcgcgaccacatagccatcgccgccgttattaccatgaccgcacagcaccagccagtggcgggcgtcaggataagccgaacgacacacctggaatgctgcttcgccagcgcgaagcatcagctcatagagtgtgagccccagcgcatctgccgcctcgcgttctccgcggcggatatcgtcggcgtaccagacggtgtgtggtatacttacggggtttttcttcattgtatggtccgtcatgtcagagcccctcgatctcaatcagttagcgcaaaaaattaaacagtgggggctggaactgggctttcagcaggtaggtattaccgataccgatctcagcgagtccgagcccaaactgcaagcatggctggacaaacaataccacggcgaaatggactggatggcacgtcacggtatgctgcgcgctcgcccccatgagttattgcccggtacgctgcgcgtgatcagcgtgcggatgaattaccttcctgctaacgccgcatttgccagcacgctgaaaaaccccaaactcggctatgttagccgttatgcgctgggccgtgactatcacaaacttctgcgcaaccgactcaaaaagctgggcgagatgattcagcaacattgtgtttcgctgaattttagaccgtttgtcgattctgcgcctattctcgagcgcccgttagctgaaaaagctgggctcggctggacaggtaagcactcacttatcctcaatcgcgaggccggttcgttcttctttttaggcgaattgctggtcgatattccgctgcccgtggatcaaccagtcgaggaaggatgcggtaaatgcgtggcctgtatgactatttgcccgaccggtgccatcgtcgagccatataccgtcgatgctcgccgctgtatctcttatctcaccatcgaacttgaaggggcgatcccggaagagttgcgaccgttaatgggaaaccgtatttacggttgcgatgactgccagcttatctgcccgtggaatcgctattcacaactcaccacagaagaggatttcagcccgcgtaagccgctacacgcaccggaactcattgagttattcgcctggagcgaagagaagtttttaaaagtcacggaaggatcggcgattcgtcgtattggtcacctgcgttggctgcgtaatatcgccgtagcattaggcaatgccccttgggatgaaacgattttgacagcgctggaaagtcgtaaaggtgagcacccacttctcgatgagcacatagcgtgggcgattgcgcagcaaatagagagacgaaatgcgtgcatagtcgaagtgcaattgccgaaaaaacagcgtctggttcgggtgattgaaaaagggttaccgcgtgacgcctgattcatccacagcttgtgaataaaaataaaaacgcattgcaattcaagacgaataaaatcgtcaagtgatcgactcgacaaaacggaatcttaatttttaacttatctatcaataggttaaaaaaatactattcaccgtgcgaagtttctttgaaattaagattacagcctgaggctgtggataactctgtttacaagagtttgtcagagacaacaaaaaccagcaataacgcatcgcgtcgctgtggatattttattgagagaagaatttggagcgggaaacgagactcgaactcgcgaccccgaccttggcaaggtcgtgctctaccaactgagctattcccgcttgggtggtctgtgccttacagcactttcaaattttggagcgggaaacgagactcgaactcgcgaccccgaccttggcaaggtcgtgctctaccaactgagctattcccgcttgggtggtctgtgctttgcagcacttttcaaattttggagcgggaaacgagactcgaactcgcgaccccgaccttggcaaggtcgtgctctaccaactgagctattcccgcgtactacttaattttgctttcgtaattttcgcatttctgcgtcgttacgggaggcgcattatacgagaaatctttccctctgcaaccccccaaaaaagttttttttgcgtttttatctcaagtgctgaaattatcagcaagacgttcaatttagcgtcaaaatcacgccgccgcaagtggattccggcgcttacgtgaccaggaaaaattttacagcttgataaaatgctcgcggtagtaagccagctccgccaccgattcacggatatcatccatcgcctgatgcgtcccctgcttggtaaaaccatccagaatttccggcttccagcggcgcgccagctctttcagggtgctgacatcgagataacggtagtggaagtaggcttccagctccggcatgtatttaaacaggaaacgacggtcctgaccgatgctgttaccgcaaatcggcgattttcccgcaggcacccactgttttaaaaattcgagcgttgccagttcagcttcccgatcgcccatcgtgctcgctttcacgcgctctaccagcccgctggcggtatgggtgcgcacgttccagtcatccatcagcgccagctgttcatcggactggtgtactgcaatggtcggcccttctgccagaatattcaggttggcatcggtcaccagcgtggcaatctcaataatgcgatcgcgctcgggatccagaccggtcatctcaagatcgatccaaatcaggttgttttcattggcactcatgctattttccacccattcacagtgactatattgatccacaattgcgtgtatcatagatgttttgcccatcaggggcgactaggagtctgtacgattgagtaaaaataaactctccaaaggccagcagcgccgcgtgaacgccaatcaccagcgtcgtcttaaaacgtctaaggagaagcccgactacgacgacaatctgtttggcgagcctgatgaaggtatcgtcatcagccgctttggtatgcacgctgatgtggaatccgccgatggcgacgttcaccgctgcaatattcgccgtaccatccgttcgctggtgaccggcgaccgcgtagtctggcgtccgggtaaaccggcggcggaaggcgtaaatgtcaaagggatcgtggaagcggtgcatgagcgcacctcggtgttgacgcgtccggatttctacgacggcgtgaaacctattgccgccaacatcgaccagattgtcattgtctccgccattttgccggagctgtcgctcaatattatcgaccgttacctggtggcctgcgaaaccttgcagattgagccgattattgtgctcaacaagatagacctgctggacgacgaaggcatggcgttcgtcaacgaacagatggatatctaccgcaatatcggttatcgcgtattgatggtttccagccatactcaggatgggctgaaaccgctggaagaggcgttgaccgggcgcatcagcatttttgccggccagtctggcgtcggcaaatccagcctgctgaacgcgttgctggggctgcaaaaagagatcctgaccaacgatgtctctgacaactcggggcttggtcagcacaccacgaccgccgctcggctgtatcacttcccgcacggcggtgatgtgattgattcccctggtgtgcgtgagttcggcctctggcacctggagccggaacaaatcactcagggctttgtcgaattccatgactatttaggtctgtgtaaatatcgcgattgcaaacacgataccgatccgggctgcgctatccgggaagcggttgaggaagggaaaatcgcggaaacccgtttcgaaaactatcaccgtattctggaaagcatggcgcaggtaaaaacgcgtaaaaacttttctgatacggatgactgacaattaagctaaccgtcgttagaatcgtcccctttttttcaggatccggcatgtaggccggatcaggaacgacaaaacaatggcctggaggctaccttgttaaattcatttaaactttcgctacagtacattctgccgaaactatggcttactcgcctggcgggttggggcgcaagcaagcgggcaggatggctgacaaaactggttatcgatctgttcgttaaatactacaaggtcgacatgaaagaggcgcaaaagccggacaccgccagctaccgcacctttaacgaattctttgtccgtccgctgcgtgacgaagtacgcccaatcgataccgatccgaatgtcctggtcatgcctgccgatggcgttatcagccagttgggtaaaatcgaagaagataaaatcctgcaagccaaaggccacaactacagcctcgaagccctgctggcaggcaactatctgatggcggacctgttccgcaacggtacgtttgtgaccacttacctctccccgcgtgactaccaccgcgtacacatgccgtgcaacggtattctgcgtgaaatgatctacgtgccgggcgatctcttctccgttaaccatctcactgctcagaacgtgccgaatctgtttgcccgtaacgaacgcgtgatctgcctgttcgataccgaatttggcccaatggcgcagattctggtcggtgcgacgattgtaggcagcattgagacggtctgggcgggcaccattacgccgccgcgcgaaggcatcatcaaacgctggacctggcctgccggggaaaacgacggttctgtggcgctgctgaaaggccaggaaatgggtcgctttaaactcggttccaccgttatcaacctgtttgcaccgggtaaagtgaatctggttgagcaactggaaagcctgtctgtcacgaaaattggccagccgctggcagtatctaccgaaacctttgttacgccagacgctgaacctgccccgcttcctgctgaagagatcgaagcagaacacgacgccagcccattggttgacgacaaaaaagaccaggtctaatccatcaaaggaaacgctgacgtgcgcctgattatcacttttctgatggcctggtgcctcagttggggggcgtacgccgcgacggcccccgatagcaaacaaatcactcaggaactggagcaggcaaaagcggcgaaacccgcacagccggaagtcgtagaggcgctccagtctgccttaaatgcgcttgaggaacgaaaaggttcccttgagcgcatcaaacaatatcagcaagttatcgataattatccgaaactctccgctactctgcgcgcacaattaaacaacatgcgtgacgagccgcgcagcgtgtcgccgggaatgtctaccgacgcgctgaatcaggaaattctccaggtcagcagccagttgctggataaaagccgtcaggcccagcaagagcaggagcgcgcccgcgagattgccgattcgctgaatcaactgccgcaacagcaaaccgacgcccgccgtcagttaaatgagatcgagcgccgcctgggaacgcttaccggcaatactccgctcaatcaggcacaaaatttcgcgttgcagtctgactctgcacgtcttaaggcgctcgttgatgaactggagctggcgcagctgtctgccaataaccgccaggaattagcgcgcttacgctcagagctggcggaaaaagagagccagcaactggatgcgtatttgcaggccttgcgtaatcaattaaacagccaacgtcagcttgaggcggagcgggcgctggaaagtaccgaattgctggcagaaaacagcgccgatttgccgaaagatatcgtcgcgcaattcaaaattaaccgcgaactatcggcggctttgaatcaacaggcgcagcggatggatctcgttgcctcgcaacagcgtcaggctgccagccagacgttacaggtccggcaggcgttgaatacgctgcgtgaacagtcgcaatggctgggatcgtccaatctgctcggcgaagcgctgcgggcgcaggtggcacggctgccggaaatgccgaaaccacaacagcttgataccgaaatggcgcagttgcgtgtgcaacggttacgttatgaggatctgcttaataaacagccgctgctacggcaaattcatcaggccgacggtcagccgctgactgccgagcaaaaccgtattctggaagcacaactgcgcactcagcgtgagttgctgaactcattgttgcagggtggcgacacgctactattggaactgaccaagctgaaagtctccaacgggcaactggaggatgcgctgaaagaggtgaacgaagcaacgcaccgctatctgttctggacctctgacgtgcgcccgatgaccatcgcctggccgctggaaatcgcccaggatctgcgtcgtctcatttcgctggacaccttcagtcagttgggcaaagccagtgtgatgatgctgaccagcaaagagacaattttgccgctgtttggcgcgttgattctggtcggttgcagtatttactcgcgccgctatttcacccgttttcttgaacgttcggcggcgaaagttggcaaagtgactcaggatcacttctggctgacgttgcgcactcttttctggtcgattctcgtcgcgtcaccgttaccggtgctgtggatgacgctgggttacggcttgcgcgaggcgtggccttatccgctggcggtcgcgattggcgatggtgtaacggccaccgtgccgctgctgtgggtagtgatgatttgcgccacctttgcccgcccgaacggcttgtttatcgctcattttggctggccgcgcgaacgtgtttcccgtgggatgcgctactacctgatgagcatcgggcttattgtgccgctgattatggcgctgatgatgttcgataacctcgacgaccgtgaattctccggttcgctgggacggctttgctttatcctcatttgcggtgcgctggcggtggtcaccctcagcctgaaaaaggccgggattccgctgtatctcaacaaagagggcagcggcgacaacattaccaaccatatgctgtggaacatgatgattggcgcgccgttggttgccattctggcgtcggcggtgggttatctggcaacggcacaggcgctgttagcgaggcttgaaacctcggttgccatctggttcctgctactggtggtttatcacgttatccgccgctggatgctgatccagcgccgcaggctggcgtttgatcgggcgaagcatcgccgggcagagatgttagcgcaacgtgcgcgtggcgaagaggaagcgcatcatcacagtagcccggaaggagcaattgaagtcgatgaaagcgaagtcgatctcgatgccatcagtgcgcaatccttgcggctggtgcgctcaattttgatgttgatcgccctgctttctgtcattgtgctgtggtcagaaatccattccgctttcggcttcctcgaaaatatttcgctgtgggatgtcacctccacggtacagggcgtagaaagtctggagccaattaccctcggtgcggtgctgattgccattctggtgtttatcatcaccacgcagctggtgcgcaacttgcccgcgctgctggaactggcgattttgcagcacctggatttaacgccgggtacgggttacgccatcaccaccatcaccaaatatctgctgatgctgattggcgggctggtcggcttctcaatgattggtattgagtggtcgaaattgcagtggctggttgccgcgctcggtgttggtctcggttttggtttgcaggaaattttcgccaactttatctctggtctgattatcctgttcgaaaaaccgattcgcattggcgatacggtgacaattcgcgatctcaccggtagcgtgacgaaaattaacacccgcgccaccaccatcagcgactgggaccgtaaagagataatcgtgccgaacaaggcgtttattaccgagcagtttatcaactggtcgctctctgactcggtcacgcgcgtggtgttgacgataccggcccctgccgatgccaatagcgaagaagtgacggaaatcctgctcaccgcagcgcgtcgctgctcgctggtgatcgacaacccggcaccggaagtcttcctggtggatctgcaacaggggattcagattttcgagctgcgtatttacgccgctgagatgggtcaccgtatgccgctacgccatgagatccaccagctgattctggctggcttccatgcccacggtatcgatatgccattcccgcccttccagatgcgtctggaaagcctcaacggtaaacaaacggggagaacgctgacgtctgcgggcaaaggtcgtcaggcgggaagtttgtaagtttgtgtgccggatgaaccaatccggctcacaaacaaaactgatagcgcagaaaaaactgccacagccagtagccgaaaatagccagcgcggtggcgtacataaaccagccgcgtttttttcgccacaaagcgaaccagagaaaagggaaaaagagcggtaacgtcattatcacaccaacatcacgggtatcgtcttcttcgagatacatcaacacatcgcagacgttgttaatcccgcgtccatcaatcatccactctttgtccagcgcggaagtgatggttatccagaggaacgccacaataaaccagatgcagcataagacaaacatgcgcgcactcataaggtaaccggtcgcttaatttcgctatagcgcatacgaaacaaatcgccgtatcccactaattccccgcgaaaaaccagacatcggataagataagcgcaataaatatccggcaggtttccccaccgtttaccatcgcgatctttgagggtgttaatggtgctacccaccaccatcgccactttacgggtgtggcaggcatcgacaaaagagagaatcgtctgctctatttccgctacatccccggcagaaaattgcagcgccctgatttcatcttcggttattgccgggtcccggctggtgtcatccataacatttcctgtctttacgccctatcgtcaggtagacgatagggcatcgggttattccaccgcccactgcggattttttgccactctgctgcaatagttctggtaaatcgccatcgctaacagcgagaagaagacagggccgccaatcatccacaatgtgctgtcccagtctccggcttcaaccacaggttgaatgatggtgaagacgttcgcaaatgtcaccaccagtacgacaaccactgtcgcaatcattgccgacaaatgcgttttgaaaatcacaaacggtctgtcgagatcctgacgtgctttaaagaacgggaaagccagcgcgaggaacagataaggaagcgtcatagacacgttcgccatcagcgtcagcttgttaaagaacgccgatgcggtaccgccaccaaacgaaaccagcaggatgaagacagtaaccaacccgcactgcatccacatggcgatagacggcatccccatcgcattcaggcgcgtcatcggttccggccacaatgctttcggcgtcccctggatgatggctttcaacggtgaatagcaaagcgtaaagaacgcaccggtataggcgaggaacatcgaaagtccagtaatacgcgcaaaccatacgcccagcgacaatgacgcttcaggtgacaaatgcagtgcattacccagcgtcatcccaaggctcttcatcagcacataggtaatattgccgaggttaacggaaccattacttaatacctgctgccagtttgtgctgacgccccataaaaatattgccagcgaataaccgattgaaataacaatagcggcaaaaacaatacctttggcaaagttcttttctggattttccgttttatcgaccagaccaccaaccgcttcaattccgccataggcaaaaatggcaaataccacaaacgatagcattgccagaccggactgataacccgggttcggtgatgcaaggaaattaatatcctgcgcgaaatgcccaccatttaataacaaaatagtaatgcttactaacagcaatactaaattcagacacattactgcaataccgcccaccgcagtaatgcgggcaattttattaatccccttagaagcaacgacggtgaccagaatcatccatgccacagccagcagaccaaccacctgcgtaggctccagtccggcaatacgccagtgctgggtcatgtcgctaccatagaggaatgttgagaacggtacccaaactttcgcggaggtactcaccatccagatgatataagaggaaaaccacataaacgtaccaatgaaggcaaaacgtggtccgacactattattcatccaggaatagataccgccttcttctttgcgataagcagctcccatttcagccatcattaaggcgaatggaataaagaataacaatgcagaaaatatataaaagggaatcgcactataacccattaagtaataagccgatgggctattggcaaatccaaatacggaagtaaagatcatcaatatgagtcctatcagactcatcttttttatcgtgtgaggcatgaaaccatccttcatttcagcgcgtgtataacacgtgcccactgaactgcactgcgcaacattgagcaggcagcgtaaaaaccaatacagaattgatacctggatgatatcaaatatccagtcttaaattgtggcctttaacggaaaaatgaaaacatatgctacagaatggcgcttatcacgccattcttcgctgttaattcagtaatttttcagaattatgcccggtcaacgctaaaggcgatgacttcagccagtgtctccgcgcccagcgccaacatcaccagacgatcaacacctaatgccacgccggaacagtcaggcataccgactttcaaggcttcaatcagattctggtcaatggggtgctgcggcaaaccgcgcgccgcgcgcttacggttatcttgttcaaagcgttgttgctgctcacgggcatccgtcaattcatggaaaccattcgccagctcaatacctttataataaacctcaaagcgttcagcgacccgatgatcttcggtactgatttgcgccagtgatgcctggctggctggaaagtggtacacaaaggtcggtttttctttgccaatatttggctctacgccaaaggtaaacagcaattgtagcagcgtgtcgcggtcttcttcggtatcagcaacattgctcaaatccagtttcgctgcgacttcccgcagttgcgttttgtcggcagagagcgggtcaatttccagataacgcaagaaagcttgttgataagaaaggctttctgctgccgggcagtccagcacctgttgtaagagatcgtccacctcgttcatcaaccggtacatatcatagtgcggtcgataccactccagcatagtgaactcagggttgtgataacgccccatctcttcattacggaagctgcggcacagctggaataccggcccacaaccggcaaccagcaggcgtttcatatggtattccgggctggtcattaaccagagattcatcccctgcgaatgcccggggccaacgaaacgtgtctcaaacgggaccaaatgaatatcggttaccgtcgcctggctcatacaaggcgtctccacctccagcactccacgatcggcaaagaaacgacggatctccgccataatcgccgcgcgttttaataagttaggaatggatgcgctcggctgccaggatgccgtttcgctcatagttaaatctccagtttttgacaagggcacgaagtctactcgcaacgcgacggcgagacaaattttacgcaggaatcaaacagcggtgggcagtgactaaaaaaagcacgatctgatggtttagtaattaaattaatcatcttcagtgataatttagccctcttgcgcactaaaaaaatcgatctcgtcaaatttcagacttatccatcagactatactgttgtacctataaaggagcagtggaatagcgttcgcagaccgtaactttcaggtacttaccctgaagtacgtggctgtgggataaaaacaatctggaggaatgtcgtgcaaacctttcaagccgatcttgccattgtaggcgccggtggcgcgggattacgtgctgcaattgctgccgcgcaggcaaatccgaatgcaaaaatcgcactaatctcaaaagtatacccgatgcgtagccataccgttgctgcagaagggggctccgccgctgtcgcgcaggatcatgacagcttcgaatatcactttcacgatacagtagcgggtggcgactggttgtgtgagcaggatgtcgtggattatttcgtccaccactgcccaaccgaaatgacccaactggaactgtggggatgcccatggagccgtcgcccggatggtagcgtcaacgtacgtcgcttcggcggcatgaaaatcgagcgcacctggttcgccgccgataagaccggcttccatatgctgcacacgctgttccagacctctctgcaattcccgcagatccagcgttttgacgaacatttcgtgctggatattctggttgatgatggtcatgttcgcggcctggtagcaatgaacatgatggaaggcacgctggtgcagatccgtgctaacgcggtcgttatggctactggcggtgcgggtcgcgtttatcgttacaacaccaacggcggcatcgttaccggtgacggtatgggtatggcgctaagccacggcgttccgctgcgtgacatggaattcgttcagtatcacccaaccggtctgccaggttccggtatcctgatgaccgaaggctgccgcggtgaaggcggtattctggtcaacaaaaatggctaccgttatctgcaagattacggcatgggcccggaaactccgctgggcgagccgaaaaacaaatatatggaactgggtccacgcgacaaagtttctcaggccttctggcacgaatggcgtaaaggcaacaccatctccacgccgcgtggcgatgtggtttatctcgacctgcgtcacctcggcgagaaaaaactgcatgaacgtctgccgttcatctgcgaactggcgaaagcgtacgttggcgtcgatccggttaaagaaccgattccggtacgtccgaccgcacactacaccatgggcggtatcgaaaccgatcagaactgtgaaacccgcattaaaggtctgttcgccgtgggtgaatgttcctctgttggtctgcacggtgcaaaccgtctgggctccaactccctggcggaactggtggtcttcggccgtctggccggtgaacaagcgacagagcgttcagcaactgccggtaatggcaacgaagcggcaattgaagcgcaggcagctggcgttgaacaacgtctgaaagatctggttaaccaggatggcggcgaaaactgggcgaagatccgcgacgaaatgggcctggcaatggaagaaggttgcggtatctaccgtacgccggaactgatgcagaaaaccatcgacaagctggcagaactgcaggaacgcttcaagcgcgtgcgcatcaccgacacctccagcgtgttcaacaccgacctgctctacaccattgaactgggccacggtctgaacgttgctgaatgtatggcgcactccgcaatggcacgtaaagagtcccgcggcgcacaccagcgtctggacgaaggttgcaccgagcgtgacgacgtcaacttcctcaaacacaccctcgccttccgcgatgctgatggcacgactcgcctggagtacagcgacgtgaagattactacgctgccgccagctaaacgcgtttacggtggcgaagcggatgcagccgataaggcggaagcagccaataagaaggagaaggcgaatggctgagatgaaaaacctgaaaattgaggtggtgcgctataacccggaagtcgataccgcaccgcatagcgcattctatgaagtgccttatgacgcaactacctcattactggatgcgctgggctacatcaaagacaacctggcaccggacctgagctaccgctggtcctgccgtatggcgatttgtggttcctgcggcatgatggttaacaacgtgccaaaactggcatgtaaaaccttcctgcgtgattacaccgacggtatgaaggttgaagcgttagctaacttcccgattgaacgcgatctggtggtcgatatgacccacttcatcgaaagtctggaagcgatcaaaccgtacatcatcggcaactcccgcaccgcggatcagggtactaacatccagaccccggcgcagatggcgaagtatcaccagttctccggttgcatcaactgtggtctgtgctacgccgcgtgcccgcagtttggcctgaacccagagttcatcggtccggctgccattacgctggcgcatcgttataacgaagatagccgcgaccacggtaagaaggagcgtatggcgcagttgaacagccagaacggcgtatggagctgtactttcgtgggctattgctccgaagtctgcccgaaacacgtcgatccggctgcggccattcagcagggcaaagtagaaagttcgaaagactttcttatcgcgaccctgaaaccacgctaaggagtgcaacatgacgactaaacgtaaaccgtatgtacggccaatgacgtccacctggtggaaaaaattgccgttttatcgcttttacatgctgcgcgaaggcacggcggttccggctgtgtggttcagcattgaactgattttcgggctgtttgccctgaaaaatggcccggaagcctgggcgggattcgtcgactttttacaaaacccggttattgtgatcattaacctgatcactctggcggcagctctgctgcacaccaaaacctggtttgaactggcaccgaaagcggccaatatcattgtaaaagacgaaaaaatgggtccagagccaattatcaaaagtctctgggcggtaactgtggttgccaccatcgtaatcctgtttgttgccctgtactggtaaggagcctgagatgatcaatccaaatccaaagcgttctgacgaaccggtattctggggcctcttcggggccggtggtatgtggagcgcaattattgcgccggtgatgatcctgctggtgggtattctgctgccgctggggctgtttccgggtgatgcactgagctacgagcgcgttctggcgttcgcgcagagcttcattggtcgcgtattcctgttcctgatgatcgttctgccgctgtggtgtggtttacaccgtatgcaccacgcgatgcacgatctgaaaatccacgtacctgcgggcaaatgggttttctacggtctggctgctatcctgacagttgtcacgctgattggtgtcgttacaatctaacgcatcgccaatgtaaatccggcccgcctatggcgggccgttttgtatggaaaccagaccctatgttcaaaacgacgctctgcgccttattaattaccgcctcttgctccacatttgctgccccccaaaaaatcaacgatattgtgcatcgcacaattaccccgcttatagagcaacaaaagatccccggtatggcggtggcggtaatttatcagggtaaaccttattactttacctggggctatgcggacatcgccaaaaagcagcccgtcacacagcaaacgttgtttgagttaggttcggtcagcaaaacatttacgggcgtgcttggtggcgacgctattgctcgaggggaaatcaagttaagcgatcccgcaacaaaatactggcctgaacttaccgctaaacagtggaacgggatcacactattacatctcgcaacctacaccgctggcggcctgccattgcaggtgccggatgaggtgaaatcctcaagcgacttgctgcgcttctatcaaaactggcagcctgcatgggctccaggaacacaacgtctgtatgccaactccagtatcggtttgttcggcgcactggctgtgaagccgtctggtttgagttttgagcaggcgatgcaaacacgtgtcttccagccactcaaactcaaccatacgtggattaatgtaccgcccgcagaagaaaagaattacgcctggggatatcgcgaaggcaaggcagttcatgtttcgccaggggcgttagatgctgaaacttatggtgtgaagtcgaccattgaagatatggcctgctgggtacgaagcaatatgaatccccgtgatatcaacgacaaaacacttcagcaagggatacaactggcacaatctcgctactggcaaaccggcgatatgtatcagggcctgggctgggaaatgctggactggccggtaaatcctgacagcatcattaacggcagtggcaataaaattgcactggcagcacgccccgtaaaagcgattacgcccccaactcctgcagtacgcgcatcatgggtacataaaacaggggcaaccggcggatttggtagctatgtcgcgtttattccagaaaaagagctgggtatagtgatgctggctaacaaaaactatcccaatccagcgagagtcaccgccgcctggcagattctcaacgctctacagtaaaatttcatcgggtccgaattttcggaccttttctgcgcttttccttgctgtcatctacacttagaaaaaaaccagtaaggaaacatttatgcgcctgctccctctcgttgccgcagcgacagctgcatttctggtcgttgcctgcagttctcctacgccgccgcgtggcgtgacagtagtgaataatttcgacgctaaacgctatctcggtacctggtatgagattgcccgttttgatcaccgttttgaacgtggactggaaaaagtcaccgcaacatacagtctgcgtgatgacggcggcctgaatgtcatcaataaaggctataaccctgacagagaaatgtggcagcagagtgaagggaaagcgtactttaccggcgcaccaacacgcgctgcgctgaaagtgtcattctttggtcctttctatggcggttataacgtcattgcacttgatcgggaataccgccatgcgctggtttgcggcccggaccgcgactacctgtggatactctcccgcacgccaaccatttctgacgaagtgaaacaggagatgctggcagtcgcgacccgggaagggtttgatgtcagtaagtttatttgggtacagcagcccggtagttagtgagtgctgagtttcagaccaataatccccaatacgattaacgccagactcgccaggcgcatcgggttagcggactcaccgagcagtacaatgccggtgatagccgcgccgactgcgccaatacccgtccacacggcataagccgtccctactggtaacgatttcatcgcccaggcaagtagcgccatactgacaatcatcgccgtcacggtaataacactcggcgtcaaacgactaaagccgtgggcatatttcaggccaacggcccataccacttccagcagaccagcaataactaagataatccaggacatatcaggctccggagaattggggccgtccccggtgaaaagacgcgtttgcaggtcgtcctgcaaagctgatggttgaacggatattttgccaggtggcaggggaatttcaactattaccttagtgactatcgcagaaaaaacaaacggcacgacacagctgtcgtaccgttattgcttattgctattgctgcgctttcgttgctgcgccagaaatcgcgttaccgccatcagaaatgtcttcaccaacgccacgcgtggtgttgcaggcagttaatactgttgaaagcaccagaacagaaaagatcgctgcaattgtcttcttcaccataacgtcttccttttaggtaatgttatttatgtttgcctatagcaaattaataatagacaacatcgccaaaaatgacggaaatctgatgatttttcggaagagaagaaaaattagctggcagcgcgagagatggagttgccgagatgtttgatgtcttcgccgaaaccgcgagcggtgttacagcccgtgagcagcgtgctggcaagcaaaacaagaacgataaggcgtttcatcatctctgacctgaataagtgatggtgcagcctgcaggccacaccacaaccgcattacttcacgcgagagacgtattcaccagagcgggtatccactttgatgacttcgccgatttgtacgaacagcggaaccttaaccacagcgccagtagacagggtagccggtttgccgccagtacctgcggtatcacctttcaggcccggatcggtatcaacgatttccagttcaacgaagttcggcggagtaacggagatcggctgaccattccacagagttacgatacactctgcctgatccagcagccatttagcgttatcgccaattgcttttgcatcagcagacagctgctcgaaagtttcgttgttcatgaagtgccagaactcaccgtcgttgtacaggtaagtcaggttcatatcgacaacatcagcgccttcagcggaatcagtagatttgaaggttttttctacgcgagtaccggtcagcagacgacgcagtttaacgcgagcaaatgcctggcctttacccggttttacgaattcactcgcttcaaccgcgtaaggttcgccgtctaacatgattttaagaccagcacgaaaatcgttgctatagtacgttgccataaggccctctgaaatttgttaattggtagctaagccacaaaatggcgcatattgtaaccctaaataccccatccagagaagattggttaacgcaacttgccgatgttgtgaccgatcctgatgaacttctgcgtcttttgaatatagacgcggacgaaaaactgttggccggacgcagcgccaaaaagctgtttgccctgcgtgtgccccgctcatttatcgatcgcatggagaaaggcaatccggacgatcctcttttgcgtcaggtacttacctcgcaagatgagtttgtcgtcgcgtccggattctccaccgacccactggaagaacagcacagcgtagtgcctggtttgttgcataaataccacaaccgggcgcttttgctggtcaaaggcggctgcgcggtaaattgccgctattgcttccgtcgccacttcccctatgccgaaaatcagggcaacaagcgtaactggcagactgcacttgagtatgttgctgcgcatccggaactggacgagatgattttctctggcggcgatccgctgatggcgaaagatcacgagctggactggttgctcacacaactggaagccatcccgcatatcaaacgtctgcggattcacagccgtctgccgattgtgatcccggcacgcatcacagatgcgctggttgaacgcttttcacattctacgctgcaaatcttgctggtgaatcacatcaaccatgccaatgagatagatgaaacattccgtcaggcgatggctaagttgcgccgggtaggcgttactttgctgaaccagagcgttctgttacgtgatgtgaacgataacgcacaaacgctggcaaacctgagtaatgcgttgttcgatgccggcgtgatgccgtattacctgcatgtgctcgataaagtacagggcgcggcgcattttatggtgagtgatgacgaagcacggcagattatgcgtgagttgctgacattggtgtcgggatatctggtgccgaaactggcgcgagaaattggcggcgaacccagcaaaacgccgctggatctccagctacgccagcagtaactgattaaacagggaagttaaacattaaaattgcctgatgcgctacgcttatcaggcctacatcatgcattgaaattgaatggatttgcaatgaactgtaggccggataaggcgtttacgccgcatccggcaagagcaacaaacgcaagtacagcaacctgtcattaaactgagaaatttaatctttgcacgttgcataacctttaattattcatatgcattgctgttgttactttttatatagctaacaccaataattaacctttcttttctgtttatatagagtgagcacggctatttatgttattttaacaactattactaccaagcccatttatctggcttataaattaaaattaattatttaattgagaaatggttagggagaacctacatggccataagcatcaagggtgttaataccggtgttattcgcaagagtaataatttcattgcactggcgctgaaaattaaagaacctcgcaataaagaatcgttgttctttatgtctgtcatggaactgcgcgacctgctgattgcgctggaaagtcgtctgcatcaaaagcataaactggatgctgctgcacgccttcagtatgagcaagctcgcgataaagtcattaagaaaatggcagaaaacatcccagaaattctggttgatgagcttaaaaatgccgatattaatcgtcgggttaacacgctggaacttaccgataatcaaggcgaaaatcttaccttcgtattaacgctacatgacggtagcaaatgtgagttagtcgtcaatgagttgcagattgaaatgctggcgcgagcaatcattcatgcaattaataatgcggaaatgcgtgaactggcattacgtattacctcactgttagatttcctgccgttatatgacgttgactgccaggaaaatggcaatctggaatatgacacctattcccaaccggaatggaaacataacttgttcgaccattatctggcggtgctttaccgctttaaagatgaaagtggcaaagaacaatttagcggcgcagtggtgaaaacgcgtgaagcaacgccgggtaaagaaatagaggcgatcactcgccgaatgcttgatttcagcccacgactgaaaaaactcgcgggtgtgccatgtcaggtctatgttcgcaccgtagcggcgaataacgcccaaccgctaacccaggatcaatgcttacgcgcgctgcatcacttacgtgttcaatccaccagcaaaactgcaccacaggcgaaataatctcatctttgctaatgcgaggctggagccatccagcctgaaatgactgataacgtgatcgttggtcatgccggatgcggcgtaaacgccttatccggcctacaaattctcaagcattcaatcagttgcaatgccttatgtaggcctgataagcgaagcgcctctggcaattatacgtttgtcaccatcacatcagttcgggcacttataaacctgaccgataatctggctatccgtcgggacaaaactggacaacattccctgcgacgggctgctgatgccataaatcacgttaccgcccattgcagccgcctggttgcgcagatcgtttgctgcgccgcgcatagaaccgccctcttctccgtgttgcccggaaagccagttgctttgcttacctgtcgcagtaccaatcagctggcactctgcgcctggctgctcgtccacaatgcgtacactctgaccggcagcactcaattcgttgctggagctacaacccgccatcagtagcgcggcaccgacaatccctgctaagtattttacgtgcatgttattccccataatcaatgagctggacgccactcgcgtcgtccgtgtctgaatcttatactagaaagatgaccaaaagaaaaacccccagacatttctgcccgggggtttgtttatttctgcgaggtgcagggcaattacatcatgccgcccatgccacccatgccgcccataccgccagcagcgcctaagtcagctgcatcatttttcggcaggtcggtaaccatgcactcggtggtgatcatcaagccagccacagaagccgcgtactgcagagcagaacgggttactttggttgggtccaggatacccatgtcgatcatgttgccgtattcttcggttgctgcgttgtaaccgtagttgccgtcgccgcctttaacggtgttagcaacaacagacggttcttcgccgcagttcaggacgatctgacgcagcggagcttccattgcacgcagtgcaactttgatacccacgttctggtcttcgttctgaccacgcaggtcagccagtttagacgctacgcggatcagcgcaacaccaccaccagcaaccacgccttcttctaccgcagcacgggtcgcgtgcagggcgtcttcaacgcgtgcttttttctctttcatttcaacttcggtagcagcacctactttgataactgcaacgccgcctgccagtttcgctacgcgttcctgcagtttttcacggtcgtagtcagaagttgcttcttcaatctgctgacggatctgagcaacacggccctggattgcagcttcttcacccacgccatcgatgatagtggtggtgtctttgttgatcacaacacgtttagcctgacccaggtcttccagggttgctttttccagttccataccgatctcttcagagatcacggtaccgccagtcagggttgcgatatcctgcagcatagctttacgacgatcgccgaagcccggagctttaactgcagcaactttcacgatgccacgcatggtgttaacaaccagagttgccagcgcttcgccttctacatcttcagcgatgatcagcagcggtttgcctgctttggcaacggcttccagaaccggcagcatttcgcggatgttggagattttcttgtcagccagcaggatgaacgggctttccagttctactgcgccagtttccggcttgttgatgaagtaaggagacaggtagccacggtcgaactgcataccttcaaccacgtccagttcgtcctgcagaccggtaccgtcttcaacggtgataacgccttctttaccgactttgtccatcgcttcagcgatcagtttacctacggtttcgtcggagttagcggagatggtaccaacctgagcaatcgctttagagtcagagcacggtacggacagcgctttcagttcttcaactgcagcggtaacggctttgtcgataccacgtttcaggtccatcgggttcatgcccgcagcaacagctttcagaccctcagtgatgatagcctgagccagtacagttgcagtggtggtaccgtcgcctgcagcgtcgttcgctttagaggcaacttctttcaccatctgcgcacccatgttttcgaacttgtcttccagttcgatttcacgagcaacggaaacaccatctttggtgatggtcggtgcaccgaaagatttatccagaactacgttacggcctttcggaccgagggtaactttcactgcatctgccagtacgtttacgccgcgcagcattttcacacgagcgtcgttaccgaattttacgtctttagctgccattatctttattccttaaattcgtatgttcagtgtcgtgcgaggattacgcttcaacaattgccagaatgtcgctttcggacatgatcaacacttcttcattgtcgatcttctcagatttcacaccgtagccatcgttgaaaataacgatgtcgccaactttcacatccagcggcttcacttcgccattttcaaggatacggccattgccgacagccagcacttcgccgcgggtggatttagccgctgcagagccggtcagaacgatgccgccagcagatttagtttcaacttctttacgcttgacgatcacgcgatcatgcaatggacgaatattcattgataactctcctttgagaaagtccgtatctgttatgggtgacgccggagcttacgtggtttcccggctggtgaccagagaaatggggatgaggcttcgccccttcaagggggaaaaagaaaaaaaattctgatcagcacaaaatcgggtgaaaaccctgattcacctcacatttcatcgcaatttcttcatcgccgtcataagcgaatctgattgtgctaccatcgaaaatctacgcagttgcccaaaatttgggcgcaatcggacatcaacccatgagtggactcaaacaagaactggggctggcccagggcattggcctgctatcgacgtcattattaggcactggcgtgtttgccgttcctgcgttagctgcgctggtagcgggcaataacagcctgtgggcgtggcccgttttgattatcttagtgttcccgattgcgattgtgtttgcgattctgggtcgccactatcccagcgcaggcggcgtcgcgcacttcgtcggtatggcgtttggttcgcggcttgagcgagtcaccggctggctatttttatcggtcattcccgtgggtttgcctgccgcactacaaattgccgccgggttcggccaggcgatgtttggctggcatagctggcaactgttgttggcagaactcggtacgctggcgctggtgtggtatatcggtactcgcggtgccagttccagtgctaatctacaaaccgttattgccggacttatcgtcgcgctgattgtcgctatctggtgggcgggcgatatcaaacctgcgaatatcccctttccggcacctggtaatatcgaacttaccgggttatttgctgcgttatcagtgatgttctggtgttttgtcggtctggaggcatttgcccatctcgcctcggaatttaaaaatccagagcgtgattttcctcgtgctttgatgattggtctgctgctggcaggattagtctactggggctgtacggtagtcgtcttacacttcgacgcctatggtgaaaaaatggcggcggcagcatcgcttccaaaaattgtagtgcagttgttcggtgtaggagcgttatggattgcctgcgtgattggctatctggcctgctttgccagtctcaacatttatatacagagcttcgcccgcctggtctggtcgcaggcgcaacataatcctgaccactacctggcacgcctctcttctcgccatatcccgaataatgccctcaatgcggtgctcggctgctgtgtggtgagcactttggtgattcatgctttagagatcaatctggacgctcttattatttatgccaatggcatctttattatgatttatctgttatgcatgctggcaggctgtaaattattgcaaggacgttatcgactactggcggtggttggcgggctgttatgcgttctgttactggcaatggtcggctggaaaagtctctatgcgctgatcatgctggcggggttatggctgttgctgccaaaacgaaaaacgccggaaaatggcataaccacataatccggcgtttcgacattaatcctggcgatcgtctttatgatcaaggcggtcgcgctcatcatcctttcgctggtactcaccatcaaaagtattaccgccaccggtcccggcgctaaaaccgccgccaggcatgcgagaaaagcgcaaatgcggcatcaacttcactgtcagatgcttttgcaccggcggcaataaaagtagaagaccgaggaagtcggtaaaaaagcccggtaataaaagcagcaaaccagcaatgatcagcgaaacacttttaatcatctccgccgctgggttttcacccgccgccattttttgctgcatcagcacgaaattcttaaagccctggttacgtaccagtgacataccgataactgacgtgaatataaccagcacgagggtcagcaatacccccaatacatgggcaacctgaataaagattgaaatctcaatatagacataaaggaaaatggcaataaaaggtaaccagcgcaaaggtttctcctgtaatagcagccggttaaccccggctacctgaatgggttgcgaatcgcgtttagcttatattgtggtcattagcaaaatttcaagatgtttgcgcaactatttttggtagtaatcccaaagcggtgatctatttcacaaattaataattaaggggtaaaaaccgacacttaaagtgatccagattacggtagaaatcctcaagcagcatatgatctcgggtattcggtcgatgcaggggataatcgtcggtcgaaaaacattcgaaaccacatatattctgtgtgtttaaagcaaatcattggcagcttgaaaaagaaggttcacatgtcaaacaacattcgtatcgaagaagatctgttgggtaccagggaagttccagctgatgcctactatggtgttcacactctgagagcgattgaaaacttctatatcagcaacaacaaaatcagtgatattcctgaatttgttcgcggtatggtaatggttaaaaaagccgcagctatggcaaacaaagagctgcaaaccattcctaaaagtgtagcgaatgccatcattgccgcatgtgatgaagtcctgaacaacggaaaatgcatggatcagttcccggtagacgtctaccagggcggcgcaggtacttccgtaaacatgaacaccaacgaagtgctggccaatatcggtctggaactgatgggtcaccaaaaaggtgaatatcagtacctgaacccgaacgaccatgttaacaaatgtcagtccactaacgacgcctacccgaccggtttccgtatcgcagtttactcttccctgattaagctggtagatgcgattaaccaactgcgtgaaggctttgaacgtaaagctgtcgaattccaggacatcctgaaaatgggtcgtacccagctgcaggacgcagtaccgatgaccctcggtcaggaattccgcgctttcagcatcctgctgaaagaagaagtgaaaaacatccaacgtaccgctgaactgctgctggaagttaaccttggtgcaacagcaatcggtactggtctgaacacgccgaaagagtactctccgctggcagtgaaaaaactggctgaagttactggcttcccatgcgtaccggctgaagacctgatcgaagcgacctctgactgcggcgcttatgttatggttcacggcgcgctgaaacgcctggctgtgaagatgtccaaaatctgtaacgacctgcgcttgctctcttcaggcccacgtgccggcctgaacgagatcaacctgccggaactgcaggcgggctcttccatcatgccagctaaagtaaacccggttgttccggaagtggttaaccaggtatgcttcaaagtcatcggtaacgacaccactgttaccatggcagcagaagcaggtcagctgcagttgaacgttatggagccggtcattggccaggccatgttcgaatccgttcacattctgaccaacgcttgctacaacctgctggaaaaatgcattaacggcatcactgctaacaaagaagtgtgcgaaggttacgtttacaactctatcggtatcgttacttacctgaacccgttcatcggtcaccacaacggtgacatcgtgggtaaaatctgtgccgaaaccggtaagagtgtacgtgaagtcgttctggaacgcggtctgttgactgaagcggaacttgacgatattttctccgtacagaatctgatgcacccggcttacaaagcaaaacgctatactgatgaaagcgaacagtaatcgtacagggtagtacaaataaaaaaggcacgtcagatgacgtgccttttttcttgtgagcagtaacttaaaaataacaatctaatatcaacttgttaaaaaacaaggaaggctaatatgctagttgtagaactcatcatagttttgctggcgatcttcttgggcgccagattggggggaataggtattggttttgcaggcggattgggggtgctggttcttgccgctattggcgttaaacccggtaacatcccgttcgatgtcatctccattatcatggcggttatcgccgctatttctgccatgcaggttgctggcggtctggactatctggttcatcagacagaaaagctgctgcgccgtaacccgaaatacatcacgatcctcgcaccgatcgtgacctatttcctgactatctttgctggtactggcaacatctctctggcgacactgccagttatcgctgaagttgcgaaggaacaaggcgttaaaccttgccgtccgctgtctactgcagtggtatccgcgcagattgcgatcaccgcatcgccaatctcagcggcagtggtttacatgtcttccgtgatggaaggtcatggcatcagctacctccatctgctctccgtggtcatcccgtccaccctgctggcggttctggtgatgtccttcctggtcactatgctgttcaactccaaactctctgacgatccgatttatcgcaagcgtctggaagagggcctggttgaactgcgcggtgaaaagcagattgaaatcaaatccggtgcaaaaacgtccgtctggctgttcctgctgggcgtagttggcgtggttatctatgcaatcatcaacagcccaagcatgggtctggttgaaaaaccgctgatgaacaccaccaacgcaatcctgatcatcatgctcagcgttgcaactctgaccaccgttatctgtaaagtcgataccgacaacatcctcaactccagcaccttcaaagcaggtatgagcgcctgtatttgtatcctgggtgttgcgtggctgggcgatactttcgtttccaacaacatcgactggatcaaagataccgctggtgaagtgattcagggtcatccgtggctgctggccgtcatcttcttctttgcttctgctctgctgtactctcaggctgcaaccgcaaaagcactgatgccgatggctctggcactgaacgtttcaccgctgaccgctgttgcttctttcgctgcggtgtctggtctgttcattctgccgacctacccgacgctggttgctgcggtacagatggatgacacgggtactacccgtatcggtaaattcgtcttcaaccatccgttcttcatcccgggtactctgggtgttgccctggccgtttgcttcggcttcgtgctgggtagcttcatgctgtaatgatcaatcgcggggcgttcacgccccgctttctttcccgccgactaacatccttcccccgtccgttgtatagtgacctctctcttgcggttccatctgttcttgcgaggtgtttatgcttgatgaaaaaagttcgaataccgcgtctgtcgtggtgctatgtacggcaccagatgaagcgacagcccaggatttagccgccaaagtgctggcggaaaaactggcggcctgcgcgaccttgatccccggcgctacctctctctattactgggaaggtaagctggagcaagaatacgaagtgcagatgattttaaaaactaccgtatctcaccagcaggcactgctggaatgcctgaagtctcatcatccatatcaaaccccggaacttctggttttacctgttacacacggagacacagattacctctcatggctcaacgcatctttacgctgatcctgctactttgcagcacttccgtttttgccggattattcgacgcgccgggacgttcacaatttgtccccgcggatcaagcctttgcttttgattttcagcaaaaccaacatgaccttaatctgacctggcagatcaaagacggttactacctctaccgtaaacagatccgcattacgccggaacacgcgaaaattgccgacgtgcagctgccgcaaggcgtctggcatgaagatgagttttacggcaaaagcgagatttaccgcgatcggctgacgcttcccgtcaccatcaaccaggcgagtgcgggagcgacgttaactgtcacctaccagggctgtgctgatgccggtttctgttatccgccagaaaccaaaaccgttccgttaagcgaagtggtcgccaacaacgcagcgccacagcctgtgtctgttccgcagcaagagcagcccaccgcgcaattgcccttttccgcgctctgggcgttgttgatcggtattggtatcgcctttacgccatgcgtgctgccaatgtacccactgatttctggcatcgtgctgggtggtaaacagcggctctccactgccagagcattgttgctgacctttatttatgtgcaggggatggcgctgacctacacggcgctgggtctggtggttgccgccgcagggttacagttccaggcggcgctacagcacccatacgtgctcattggcctcgccatcgtctttaccttgctggcgatgtcaatgtttggcttgtttaccctgcaactcccctcttcgctgcaaacacgtctcacgttgatgagcaatcgccaacagggcggctcacctggcggtgtgtttgttatgggggcgattgccggactgatctgttcaccatgcaccaccgcaccgcttagcgcgattctgctgtatatcgcccaaagcgggaacatgtggctgggcggcggcacgctttatctctatgcgttgggcatgggcctgccgctgatgctaattaccgtctttggtaaccgcttgctgccgaaaagcggcccgtggatggaacaagtcaaaaccgcgtttggttttgtgatcctcgcactgccggtcttcctgctggagcgagtgattggtgatgtatggggattacgcttgtggtcggcgctgggtgtcgcattctttggctgggcctttatcaccagcctacaggctaaacgcggctggatgcgtattgtgcaaattattctgctggcagcggcattggttagcgtgcgcccacttcaggattgggcatttggtgcgacgcataccgcgcaaactcagacgcatctcaactttacacaaatcaaaacggtagatgagttaaatcaggcgctcgttgaagccaaaggcaaaccggtgatgttagatctttatgccgactggtgcgtcgcctgtaaagagtttgagaaatacaccttcagcgacccgcaggtgcaaaaagcgttagcagacacggtcttacttcaggccaacgtcacggccaacgacgcacaagatgtggcgctgttaaagcatcttaatgtccttggcctaccgacaattctcttttttgacggacaaggccaggagcatccacaagcacgcgtcacgggctttatggatgctgaaaccttcagcgcacatttgcgcgatcgccaaccgtgaacgacacttgcagtgggaaagacggaggaaaatagcgtgcaacgtgaagatgtactgggagaagccctgaaattattagaattacaagggattgccaacaccacgctggagatggttgctgaacgtgtggattatccactggacgagctacgccgcttctggccagacaaagaggcaatcctctacgatgcgctgcgttatcttagccaacagatagatgtctggcgtcgtcagctgatgctggacgaaacgcaaaccgccgaacaaaagctgctggcacgttatcaggcgttatcggagtgcgttaaaaacaaccgctatccgggctgtctatttatcgctgcctgtacgttttatcccgatcctggccaccctattcatcaactggccgatcagcaaaaaagcgcggcctacgatttcacccacgaactgttaaccacactggaagttgacgatccggcgatggtagcaaagcagatggaactggtgctggaaggctgtttaagccgaatgctggtgaatcgtagccaggcggatgtcgacactgcacatcggctggcggaagatatcctgcgcttcgcccgctgccgccagggtggtgcattgacctgacagaaacacagaaaagaagcgatttgccgcaatcttaagcagttgaatcgcttttactgaaattaggttgacgagatgtgcagattacggtttaatgcgccccgttgcccggatagctcagtcggtagagcaggggattgaaaatccccgtgtccttggttcgattccgagtccgggcaccaaattcatataaacggacctccacggaggtccgtttttcgtttcaggacgccacgatttaagcgttctgcctccaaatcaattctaccgaactcaaccagattctccccacatcaccagcaatttgcgggcatatcccaattcgggaaaatttgttcctgagctatagcactaactgacgtgaaatgtcgtgcggccccgtgatgctgttgaacgtcaaatgacgtcatcaggagcgtaacgcatccataaagcacaacaccggtctgaacggcgactgatgagattttctgaatgagaacaaagagaaatgtatcagttcgcttgctcatgcaaagactaacaatccattaaaatagtaagtgctccggacaattttccatggattattttctgaacatttttctttggcaaagatgatgaattttgatggtaaggaatattacttctggttctcagtaaaatcctttcgtaatactatgtaatcaagaagtttatggctggtaaaaataacgtcttgcattcaccaataatatgtaaataaacccatctatagatggtaaaaataggttgtggcaattatcattgcatcattcccttttcgaatgagtttctattatgcaacaacctgtagttcgcgttggcgaatggcttgttactccgtccataaaccaaattagccgcaatgggcgtcaacttacccttgagccgagattaatcgatcttctggttttctttgctcaacacagtggcgaagtacttagcagggatgaacttatcgataatgtctggaagagaagtattgtcaccaatcacgttgtgacgcagagtatctcagaactacgtaagtcattaaaagataatgatgaagatagtcctgtctatatcgctactgtaccaaagcgcggctataaattaatggtgccggttatctggtacagcgaagaagagggagaggaaataatgctatcttcgcctccccctataccagaggcggttcctgccacagattctccctcccacagtcttaacattcaaaacaccgcaacgccacctgaacaatccccagttaaaagcaaacgattcactaccttttgggtatggttttttttcctgttgtcgttaggtatctgtgtagcactggtagcgttttcaagtcttgatacacgtcttcctatgagcaaatcgcgtattttgctcaatccacgcgatattgacattaatatggtaaataaaagttgtaacagctggagttccccgtatcagctctcttacgcgataggcgtgggtgatttggtggcgacatcacttaacaccttctccacctttatggtgcatgacaaaatcaactacaacattgatgaaccgagcagttccggtaaaacattatctattgcgtttgttaatcagcgccaataccgtgctcaacaatgctttatgtcgataaaattggtagacaatgcagatggttcaaccatgctggataaacgttatgtcatcactaacggtaatcagctggcgattcaaaatgatttactggagagtttatcaaaagcgttaaaccaaccgtggccacaacgaatgcaggagacgctccagaaaattttgccgcatcgtggtgcgttattaactaatttttatcaggcacatgattatttactgcatggcgatgataaatcattgaaccgtgccagtgaattattaggtgagattgttcaatcatccccagaatttacctacgcgagagcagaaaaagcattagttgatatcgtgcgccattctcaacatcctttagatgaaaaacaattagcagcactgaacacagaaatagataacattgttacactgccggaattgaacaacctgtccattatatatcaaataaaagcggtcagtgctctggtaaaaggtaaaacagatgagtcttaccaggcgataaatactggcattgatcttgaaatgtcctggctaaattatgtgttgcttggcaaggtttatgaaatgaaggggatgaaccgggaagcagctgatgcatatctcaccgcctttaatttacgcccaggggcaaacaccctttactggattgaaaatggtatattccagacttctgttccttatgttgtaccttatctcgacaaatttcttgcttcagaataagtaactccgggttgatttatgctcggaaatatttgttgttgagtttttgtatgttcctgttggtataatatgttgcggcaatttatttgccgcataatttttattacataaatttaaccagagaatgtcacgcaatccattgtaaacattaaatgtttatcttttcatgatatcaacttgcgatcctgatgtgttaataaaaaacctcaagttctcacttacagaaacttttgtgttatttcacctaatctttaggattaatccttttttcgtgagtaatcttatcgccagtttggtctggtcaggaaatagttatacatcatgacccggactccaaattcaaaaatgaaattaggagaagagcatgagttctgccaagaagatcgggctatttgcctgtaccggtgttgttgccggtaatatgatggggagcggtattgcattattacctgcgaacctagcaagtatcggtggtattgctatctggggttggattatctctattattggtgcaatgtcgctggcgtatgtatatgcccgactggcaacaaaaaacccgcaacaaggtggcccaattgcttatgccggagaaatttcccctgcatttggttttcagacaggtgttctttattaccatgctaactggattggtaacctggcgattggtattaccgctgtatcttatctttccaccttcttcccagtattaaatgatcctgttccggcgggtatcgcctgtattgctatcgtctgggtatttacctttgtaaatatgctcggcggtacttgggtaagccgtttaaccactattggtctggtgctggttcttattcctgtggtgatgactgctattgttggctggcattggtttgatgcggcaacttatgcagctaactggaatactgcggataccactgatggtcatgcgatcattaaaagtattctgctctgcctgtgggccttcgtgggtgttgaatccgcagctgtaagtactggtatggttaaaaacccgaaacgtaccgttccgctggcaaccatgctgggtactggtttagcaggtattgtttacatcgctgcgactcaggtgctttccggtatgtatccgtcttctgtaatggcggcttccggtgctccgtttgcaatcagtgcttcaactatcctcggtaactgggctgcgccgctggtttctgcattcaccgcctttgcgtgcctgacttctctgggctcctggatgatgttggtaggccaggcaggtgtacgtgccgctaacgacggtaacttcccgaaagtttatggtgaagtcgacagcaacggtattccgaaaaaaggtctgctgctggctgcagtgaaaatgactgccctgatgatccttatcactctgatgaactctgccggtggtaaagcatctgacctgttcggtgaactgaccggtatcgcagtactgctgactatgctgccgtatttctactcttgcgttgacctgattcgttttgaaggcgttaacatccgcaactttgtcagcctgatctgctctgtactgggttgcgtgttctgcttcatcgcgctgatgggcgcaagctccttcgagctggcaggtaccttcatcgtcagcctgattatcctgatgttctacgctcgcaaaatgcacgagcgccagagccactcaatggataaccacaccgcgtctaacgcacattaattaaaagtattttccgaggctcctcctttcattttgtcccatgtgttgggaggggccttttttacctggagatatgactatgaacgttattgcaatattgaatcacatgggggtttattttaaagaagaacccatccgtgaacttcatcgcgcgcttgaacgtctgaacttccagattgtttacccgaacgaccgtgacgacttattaaaactgatcgaaaacaatgcgcgtctgtgcggcgttatttttgactgggataaatataatctcgagctgtgcgaagaaattagcaaaatgaacgagaacctgccgttgtacgcgttcgctaatacgtattccactctcgatgtaagcctgaatgacctgcgtttacagattagcttctttgaatatgcgctgggtgctgctgaagatattgctaataagatcaagcagaccactgacgaatatatcaacactattctgcctccgctgactaaagcactgtttaaatatgttcgtgaaggtaaatatactttctgtactcctggtcacatgggcggtactgcattccagaaaagcccggtaggtagcctgttctatgatttctttggtccgaataccatgaaatctgatatttccatttcagtatctgaactgggttctctgctggatcacagtggtccacacaaagaagcagaacagtatatcgctcgcgtctttaacgcagaccgcagctacatggtgaccaacggtacttccactgcgaacaaaattgttggtatgtactctgctccagcaggcagcaccattctgattgaccgtaactgccacaaatcgctgacccacctgatgatgatgagcgatgttacgccaatctatttccgcccgacccgtaacgcttacggtattcttggtggtatcccacagagtgaattccagcacgctaccattgctaagcgcgtgaaagaaacaccaaacgcaacctggccggtacatgctgtaattaccaactctacctatgatggtctgctgtacaacaccgacttcatcaagaaaacactggatgtgaaatccatccactttgactccgcgtgggtgccttacaccaacttctcaccgatttacgaaggtaaatgcggtatgagcggtggccgtgtagaagggaaagtgatttacgaaacccagtccactcacaaactgctggcggcgttctctcaggcttccatgatccacgttaaaggtgacgtaaacgaagaaacctttaacgaagcctacatgatgcacaccaccacttctccgcactacggtatcgtggcgtccactgaaaccgctgcggcgatgatgaaaggcaatgcaggtaagcgtctgatcaacggttctattgaacgtgcgatcaaattccgtaaagagatcaaacgtctgagaacggaatctgatggctggttctttgatgtatggcagccggatcatatcgatacgactgaatgctggccgctgcgttctgacagcacctggcacggcttcaaaaacatcgataacgagcacatgtatcttgacccgatcaaagtcaccctgctgactccggggatggaaaaagacggcaccatgagcgactttggtattccggccagcatcgtggcgaaatacctcgacgaacatggcatcgttgttgagaaaaccggtccgtataacctgctgttcctgttcagcatcggtatcgataagaccaaagcactgagcctgctgcgtgctctgactgactttaaacgtgcgtttgacctgaacctgcgtgtgaaaaacatgctgccgtctctgtatcgtgaagatcctgaattctatgaaaacatgcgtattcaggaactggctcagaatatccacaaactgattgttcaccacaatctgccggatctgatgtatcgcgcatttgaagtgctgccgacgatggtaatgactccgtatgctgcattccagaaagagctgcacggtatgaccgaagaagtttacctcgacgaaatggtaggtcgtattaacgccaatatgatccttccgtacccgccgggagttcctctggtaatgccgggtgaaatgatcaccgaagaaagccgtccggttctggagttcctgcagatgctgtgtgaaatcggcgctcactatccgggctttgaaaccgatattcacggtgcataccgtcaggctgatggccgctataccgttaaggtattgaaagaagaaagcaaaaaataattagctcgtacaagggaagtggcttgccacttcccttttttgctcataaggagaacacatgaaaacaccctcacagccgcgcgcgatatactatatcgtggcgatccaaatctgggagtacttcagtttttacggcatgcgtgccttactcattctctatctcacccatcagcttggttttgatgataaccatgccatcagcctgttcagcgcatatgcttctctggtttacgttacccctattctcggcggctggcttgccgaccgcctgctcggcaaccgcactgcagtgattgccggcgcgctgttaatgacccttggccatgtggtgctgggtattgatacaaattcaacctttagcctgtatctggcgctggcaatcattatttgtggctacggtttattcaaatcaaacatcagctgtttgcttggcgagctctacgacgagaacgatcatcgacgtgatggcggtttttcgctgctgtatgctgcgggcaatatcggttctatcgcagccccaatcgcctgcggcctggctgctcagtggtatggatggcatgttggctttgcccttgcgggtggcggcatgtttatcggtttgttgattttcttaagcggtcatcgtcatttccagtccacacgtagtatggataaaaaagcgctcactagtgtcaaatttgccttaccagtatggagctggttagtggtgatgctctgtttagccccagtattttttactctgctgctggagaacgactggtccggatatttgctggcgatcgtttgcctcattgccgcacaaatcattgcccgcatgatgatcaaattccccgaacatcgccgtgctctttggcaaattgtattgttgatgtttgtcgggacattgttctgggtactggcacaacagggcggcagtaccatcagcttgtttatcgatcgctttgtgaatcgtcaggcattcaatattgaagtacctacagcactattccagtcggtgaatgcaattgcggtgatgctcgctggggttgtactggcctggctggcgtcgccagaaagccgcggcaactcaacattgcgcgtctggctgaagtttgcctttggcttactgctgatggcttgtggctttatgttgttggcatttgatgcccgacatgcagcggctgacggtcaagcgtcaatgggcgtgatgatatccgggctggcgctaatgggctttgccgaactctttattgacccggtggcgattgcgcaaatcacgcgtctgaaaatgtctggcgtattaaccgggatttatatgctggcaacaggcgcggtcgccaactggctggcaggcgtcgtggcacagcagacgacagagtcgcaaattagcggtatggcaattgcagcttaccagcgattcttttctcagatgggagagtggacgttggcttgtgtcgcgatcatcgtcgtattggcctttgctacccgttttctgtttagcacgccgacgaatatgatacaggagagcaacgattaactgtcgtaaaaacaattggttatgaataaattaactttcagtttataacactaacaaatcgagattaataagtcatttaaaccattttgatggttatttattagtgatatcaacttgaggtaagcgttagtttcgataagataaactgagttactaatagtcgaggcagataatacagtgtaccgatctgtctctttatctacgctaaattgaaagctggatttagaggaaccaaaatgtctgaacaagaaacacggggagccaatgaggctattgattttaacgatgaactgagaaatcgccgcgaaaaactggcggcactacgtcagcaaggtgtggcgtttcccaatgattttcgccgcgaccatacctctgaccagttgcacgaagagtttgatgcgaaggataaccaggaactggaatccttaaacattgaagtctcggttgctggccgaatgatgacccgtcgtatcatggggaaagcctcctttgtaacgttgcaggatgtcggtggccgtattcaactgtacgttgcaagagatagcctgccagaaggtgtttataacgatcagtttaaaaaatgggatctgggtgacattatcggtgcccgcggtacgctgtttaagacgcaaacgggtgagctttccattcactgtactgagctgcgcctgctgactaaagcactacgtcctttaccagataaattccatggtctgcaggatcaggaagtccgttatcgtcaacgttatctggacctcatcgctaacgataaatcccgtcaaacgtttgttgtccgttcaaaaattctggccgctatccgtcaattcatggtcgcgcgcggctttatggaagtagaaaccccgatgatgcaggtaattccaggtggggcatctgctcgcccgtttattacccatcataatgctctggatttagatatgtatctgcgtatcgcgccggagctgtatctgaaacgtctggttgtaggcggttttgaacgggtattcgaaatcaaccgtaacttccgtaatgaaggtatttctgttcgccataatcctgagttcacaatgatggaactctacatggcgtatgcggattaccacgatttgattgaactgacagagtcactgttccgcaccctggcacaagaggttctgggtaccactaaagtcacttatggcgagcatgtgtttgatttcggcaaaccgtttgaaaaactcaccatgcgcgaagcaatcaaaaaatatcgtccagaaaccgatatggccgacctggataattttgatgctgctaaagcattagctgaatctatcggtattacggtagagaaaagctgggggttgggacgtattgtcacagagatctttgatgaagtggcagaagcacatctgattcagccaacctttattacggaatatccggcagaagtgtccccgctggcacgccgtaatgatgttaacccggaaatcaccgaccgttttgaattcttcatcggtggtcgtgaaatcggtaatggttttagcgaattaaacgacgcagaagatcaggctgaacgtttccaggaacaggttaatgctaaagctgcaggtgacgacgaagccatgttctatgacgaagattacgtgactgcgctggaatatggtctgccgccaaccgctggtctgggtattggtatcgaccgaatgattatgctgtttactaacagccatactattcgcgacgttattctcttcccggcgatgcgcccacagaaataaatttcactttaatgaacgaagcagtcaggcgactgcttcgttcatcgttccgcaaatccagttttgaggagagacgcttcgtttcacgataaccagcgggtccactcaactacagctcctaaaagagagaaaaaagtaatgccacaggcagactcattggccaggttattccgaccaggaatgcactaagtaaacgaatatgtgttttctcatgtgagataaaccagataatgacaaaggatatgttcacaccaatcacataaaaaattaatattttagagaatagtgccattttttatgttcttcttatccttcctggctacttgtaaaactgacggaaatagtcatcaactgtcataatgttgaggtcaaaatcaatatccggtaagtctaagcatttgagcctgattaaatcttcgatttcacttgcggctaacgatgtcgttattgcgaaggagttttcattcaattgtcgtggtatcccatattcatcagccacgatagaggagaaattcatatcatacatcaatgatcttaatcttaagaacactgaggaataagatgatggataatcaaaagaaacaacataagtattgaacttgtttttaccttccataatatgactcctatcaatattaaacgctctggggacgcaaaacttattaaccccgattgatgattctcatataggagatattcttttttttgctcagtaaaggggatgacttgggacaaaaaaacgcgctctctgcccattctttgtgcatccccctacccttcagatgctctcctgcatcacatcgcggagagaatgaaaaatatcgtgactctgtactctcccatcaactgcgaatatcatcatactcccgcgttttatcaaattcatgtttcgcaaatgggcataatgggataatttttcgtttttcccgacgcattttttccacgactttcgcaaccagctgtttaccaatcccttgccctttcaggctttcatcgacatcggtatgttcgataatcgctaaattctctccggtcggcacaaagacaatttcagcgatttgcttgccttgtttgtcattaatgtaaaatttattgtggccttcgcgtatttccattttaccctcgcttatttatgacggtatttcagcgcgccgctcgggcacgtatcaatcactttaaccacagtggcgacgtcgacttcatccggcatgatccacggctttcgtttgagattaaataacttgccgttgccacgtacgcaattgccagaatgctgacatatcgcagtgttgaaatagacatcgatcttttcgccggtataacagcgataacccccgtccagtagcgcctgatccatgaccttccctctctcatcagtatgattatcgctataagcatagccccggaatcttcatacagcactggcagtttccgttgccagagtctcttcccctatatagccaatcattcttactccctttgaattacccgcctcatcagagataatgcttaagaaatttgtcacacaaggaagctgatgagacattcattgccctaccgcatgttacgcaaacgtccgatgaaattgagtaccacagtgatcttaatggtcagtgcggtactgttctcggtgctattggtggtgcatctgatttacttctcgcaaatcagtgatatgacgcgagatgggctagccaacaaggcactggcagtggcgcgtaccctcgccgactcgccggaaatccgtcagggcttgcagaaaaaaccgcaggagagtggcatccaggccatcgcggaagccgtacgcaaacgcaacgatctgctgtttattgtcgttaccgatatgcaaagtcttcgctactcgcatcctgaagcccagcgtattggtcagccatttaaaggtgatgacatccttaaagcgctgaatggcgaagaaaatgtcgctatcaatcgcggttttctggcgcaggctttacgcgtatttacccccatctacgatgaaaatcataaacaaattggcgtggtggcgatcggccttgagttaagccgtgtgacccaacagatcaatgacagtcgctggagcattatctggtcggtattatttggcatgctggtcggactgattggcacctgcattctggttaaggtactgaaaaaaatccttttcggcctggaaccctacgaaatctccacgctgtttgagcaacgccaggccatgttgcagtctatcaaagaaggcgtcgttgccgtggacgatcgcggcgaggtcacgctgatcaacgatgccgcacaagaattgctgaattaccgtaagtcgcaggacgatgagaaactgtcgacgctaagccactcatggtcacaggtggtagatgtctcggaagtgttacgcgacggtaccccgcgccgcgacgaagagattacgattaaagaccggctattactgatcaacaccgttccggtgcgcagtaatggcgttatcatcggtgccatttcaaccttcagggacaaaactgaagtacgtaaactgatgcagcgactcgacggtctggtcaactatgctgacgcacttcgtgaacgatcccacgaatttatgaataaattgcatgtgattctcggattattgcatctgaagagttataagcagttggaagattacattctcaaaacagccaataactatcaggaagagattggctctctgctgggtaagatcaaatctccggttatcgctggttttttaatcagcaagattaaccgcgcgaccgatttaggccatacgctgattttaaacagtgaaagccagctgccagacagcggcagtgaggaccaggtcgcgacgctgattaccacgttgggaaatctgatagaaaacgcgctggaggcattagggccggaacccggaggcgaaattagcgtaacattgcactaccgtcacggctggctgcactgtgaagttaatgatgatggaccggggatcgcacccgataaaatcgatcacatttttgacaaaggtgtctcgacaaaaggaagcgagcgaggcgtcggtttagcacttgtcaaacaacaggtagaaaatctcggcggcagcatcgccgtggaatcggaacccgggattttcacacaattttttgtccagataccctgggacggggagaggtcgaacagatgatcaatgtattaattatcgatgacgacgcaatggtcgcggagctgaatcgccgatacgtagcacaaatcccaggctttcaatgctgtggaacagcctcgacgctggagaaagccaaagagattatcttcaatagcgatacgcctatcgacctgatattgctcgatatctatatgcaaaaagagaacgggctcgatttactgcctgtcctgcataacgcgcgttgcaaaagtgatgtgattgtcatctcctccgcagccgatgcggcaaccattaaagattcgctgcattacggtgtcgtggattacctgatcaaacccttccaggcttcccgctttgaagaggcgctcaccggctggcggcaaaagaaaatggcgctggaaaaacatcagtattatgaccaggccgagcttgatcagctaatccacggcagcagctccaacgaacaggatcctcgtcgcttgccaaaaggcttaacgccgcagacgttacgcacactgtgccagtggattgacgcgcatcaggactatgaattttcaaccgacgagctagccaacgaggttaacatttcgcgtgtttcctgccgtaaatacctcatctggctggtcaactgccacatcttgttcaccagtatccattatggcgtcacggggcgtccagtttaccgttaccgtattcaggcagaacactactcactactgaaacaatattgccaataacggatcgctggttatctgtaagtaataattattaccgtaatgcaaaatacccctggcacaagttacatccttcatcagtaaaacttgtgccagatcaaatataattatccctccatcatcgctaaaaattaatatctcttcaggtgaacggtgtttttaatttcaaaacgctaacaaaagttaattaactattatgtcacccgcattatgtgtatttttacccacaaatgggtagatcagattaatctataaacctaatgacatctgccctgagaacaaaaaatagaccgataaatatcaataagataacagcaaacaaaacattaacatctgcgcagtacaaactataaacccatcgccagagagtctttctctctgaaaaagccgcttatcacagtgcataaatttgccgctgctttaatcagccaatattcactgtgaggtatttgctaaagccggtaacgaccaaacggatatttagtcaggctctgaaaacagttcatacaaaacagaacgtgactgtgatctattcagcaaaaatttaaataggattatcgcgagggttcacacatgttatttactatccaacttatcataatactgatatgtctgttttatggtgccagaaagggtggtatcgcgctgggtttattaggcggtatcggtctggtcattctggtcttcgtcttccaccttcagccaggtaaaccaccagttgatgtcatgctggttatcattgcggtggtggcggcatcggcgaccttgcaagcttcgggcggtcttgatgtcatgctgcaaattgccgagaagctgctgcgccgcaacccgaaatatgtctcaattgtcgcgccgtttgtgacctgtacactgaccattctttgcggtacgggtcatgtggtttacaccattctgccgatcatctacgacgtcgccattaagaacaacatccgtccggaacgtccgatggcggcaagttctatcggtgcacagatggggattatcgccagtccggtgtcggttgcggtcgtgtctctggttgcgatgctgggtaatgtcacctttgatggtcgccatcttgagttcctcgatctgctggcaatcaccattccatcgacgttaatcggtatcctggcgatcggtatcttcagctggttccgcggtaaagatctggataaagacgaagagttccagaaattcatctccgtaccggaaaaccgtgagtatgtttacggtgataccgcgacgctgctggataaaaaactgccgaaaagcaactggctggcaatgtggattttcctcggggcaatcgctgtagtcgcccttcttggtgctgattcggacctgcgtccatccttcggcggcaaaccgctgtcgatggtactggttattcagatgtttatgctgctgaccggggcgctgattattatcctgaccaaaaccaatcccgcgtctatctcaaaaaacgaagtcttccgttccggtatgatcgccatcgtggcggtgtacggtatcgcatggatggcagaaaccatgttcggtgcgcatatgtctgaaattcagggcgtactgggtgaaatggtgaaagagtatccgtgggcctatgccattgttctgctgctggtttccaagtttgtaaactctcaggctgcggcgctggcggcgattgttccggtcgcgctggcgatcggcgttgatccggcatacatcgtggcttcagcaccggcttgctacggttattacatcctgccgacttatccgagcgatctggcagcgattcagtttgaccgttccggcaccacccacatcggtcgcttcgtcatcaaccacagctttattctgccggggttgattggtgtgagcgtatcgtgcgtcttcggctggatcttcgccgcgatgtacgggttcttataaatgcactttgcgtgccgcccgtgactacgcggcacgccattttcgaataacaaatacagagttacaggctggaagctatgtcaaacaaaccctttatctaccaggcacctttcccgatggggaaagacaataccgaatactatctactcacttccgattacgttagcgttgccgacttcgacggcgaaaccatcctgaaagtggaaccagaagccctgaccctgctggcgcagcaagcctttcacgacgcttcttttatgctccgcccggcacaccagaaacaggttgcggctattcttcacgatccagaagccagcgaaaacgacaagtacgtggcgctgcaattcttaagaaactccgaaatcgccgccaaaggcgtgctgccgacctgccaggataccggcaccgcgatcatcgtcggtaaaaaaggccagcgcgtgtggaccggcggcggtgatgaagaaacgctgtcgaaaggcgtctataacacctatatcgaagataacctgcgctattcacagaatgcggcgctggacatgtacaaagaggtcaacaccggcactaacctgcctgcgcaaatcgacctgtacgcggtagatggcgatgagtacaaattcctttgcgttgcgaaaggcggcggctctgccaacaaaacgtatctctaccaggaaaccaaagccctgctgactcccggcaaactgaaaaacttcctcgtcgagaaaatgcgtaccctcggtactgcagcctgcccgccgtaccatatcgcgtttgtgattggcggtacgtctgcggaaaccaacctgaaaaccgtcaagttagcaagcgctcactattacgatgaactgccgacggaagggaacgaacatggtcaggcgttccgcgatgtccagctggaacaggaactgctggaagaggcccagaaactcggtcttggcgcgcagtttggcggtaaatacttcgcgcacgacattcgcgttatccgtctgccacgtcacggcgcatcctgcccggtcggcatgggcgtctcctgctccgctgaccgtaacattaaagcgaaaatcaaccgcgaaggtatctggatcgaaaaactggaacacaacccaggccagtacattccacaagaactgcgccaggccggtgaaggcgaagcggtgaaagttgaccttaaccgcccgatgaaagagatcctcgcccagctttcgcaatacccggtatccactcgtttgtcgctcaccggcaccattatcgtgggccgagatattgcacacgccaagctgaaagagctgattgacgccggtaaagaacttccgcagtacatcaaagatcacccgatctactacgcgggtccggcgaaaacccctgccggttatccatcaggttcacttggcccaaccaccgcaggccgtatggactcctacgtggatctgctgcaatcccacggcggcagcatgatcatgctggcgaaaggtaaccgcagtcagcaggttaccgacgcgtgtcataaacacggcggcttctacctcggtagcatcggcggtccggcggcggtactggcgcagcagagcatcaagcatctggagtgcgtcgcttatccggagctgggtatggaagctatctggaaaatcgaagtagaagatttcccggcgtttatcctggtcgatgacaaaggtaacgacttcttccagcaaatcgtcaacaaacagtgcgcgaactgcactaagtaacctcttcggcccagcgcctggcagcatgctgccaggtgatccccctgggccacctcttttgcgattgtaatttcacgcttgctggtgaatagtcagtattttccctgatttgcgaactcaccatgacccgcacactcaagccgttaattcttaacaccagcgcactgacgctaacgttaatcctgatttataccggcatttcggcccatgacaaactcacctggctgatggaagtgacaccggtgattattgtcgtgcagctactgcttgccaccgccagacgttatccgttaacgccgctgctctatacgctcattttccttcacgccatcatcctgatggtcggcggacaatacacctacgcgaaagtccccgttggttttgaggtgcaggaatggctggggttgagtcgtaatccgtatgacaagctggggcactttttccaggggctggtgcctgcactggtggcacgagaaattctcgttcgcgggatgtacgtgcgcggacgtaaaatggtggcgttcctggtctgctgcgtggcgctggcgataagcgcgatgtatgaattaatcgagtggtgggcagcgctggcaatgggtcagggagcggatgattttctcggcacccagggcgaccagtgggacacgcaatccgatatgttctgcgcgctgcttggcgcattaacgacggtgatattcctcgctcgctttcattgccgccagctacggcgctttggcttgataaccggataacaacttgcgctttgttgatgccggatgcggcgtgaattccttatccggtctacaaaatttgcaaatccaaagcattacattaagacgtggcctgataaacatatcgcatcaggccattttcgttagctattgtccacgtcaggctttcacatcactcactgcaccgaccggaatatcagcatgaacaggctcgggcggtactttgcgatatttatccagcagatggatctggatcctgcgcagcgtgtcaccattgaggcgatagaaacggaagtagagaatcagcgttaccatgaaaaacagagttggtagagcaatcataataaactgcatacctaatagggcttgcgtagactgttcaacattcggtacatagccaatcatccctaacacaaccgcaatgaaaaaagccgcaaaggctgaaccgcccttcaccaccatagtctgcacggagtaagcgatactttcacagcgtacgtgcagtttatattcaccgtaatcaacgatatctgccaccatgatgacctgtaatacccagaaaagcgccgttcccacattcagcaaaatacccgcaatcacaatgaggacgacgttgtgatagctcattaatgccattaacaggagaacaccacagcttaacaccggaagaatagatgctccggcccataaaatgcgtcgggataatgatttaactaagcgtgggaagaatactaacgtcaccaggttagcagctcccgcatacgacagataataggggaacaaatccgcatcaccgataacatatgagaaataatagatagcaaagccggtaataatgttgctggctacattataagcaagagccatacccaagaggcatgaaagctgatcgtttttataaattagcgcaacgatggctttaagtgtcagatggcttccttcagcagacggttgattgtctgacgaaaagacttcatgcacattgcgcagagtgatgatggttgaaacaataaaaaaggcgatcagtaccagagtgaacatctgaaagccaaatccccgatcgccaccgccgacataattaacaaatggtagcgtcacacctgccgtaacaaagcctgccagactggcaaaaaaacgcggataaggaaccagttgttcgcgctcacgtttatcgagcgtgatggttggaaccagcgaccagaagggaatatccataatggtgtaagtcatgccccagaggatgtaggtcacgcaaacaaagacaatctgagtagtaccttcaaacagatgcgcactaaagaggagaaataagattacagagtttgccaacgtaccgatcaggatccagggtttgaacttaccccatcgcgatcgcgtagcatttacaatccatcccataatcggatcgttaatagcatcccagatcctcgccaccagaaacaaagtaccgaccaaacccacagacagcccgacgacatcggtgtagtaatacatgaggtacatatacacaatgccgatcgcaaaatccttcccgaacgctccaaatccataactgagttttgtagtcattgaaatgctcatagggtatcgggtcgctgttaccaacgcccgccttctgttattggtatcgtcagaggtgtgcgccggaataaatcccccggcgcagtagcgtttagtcgcgttttaacggtgcaaccagcctggcagccagtcgccgtgggcggcaatcaggtcgtcaacaagagcatatatttcgtcaatgcccagcacggcggcagtatgcgggtccatcatcgcggcgtggtaaacacggtcgcgattttccgtaagaatagcttcggtcagcagcgtctgtacgttgatgttggtttgcatcagggcggccagatgcgaaggtagcgtaccgactttggtcggctgaatgccattagcatcaaccagacaggctacttccacgcaacatccttgtggcaggttatcaatcaaaccatcgttacggacgttgccgtaaatcacactcggctcgccagtccagatagcgttcatgattgtgctggcatattcccgtgacggtttaatatcaatccgggaggcttttttatactcctccagctctttatgccagttcgccagctgctcgacgcagcgtttcgggtactcatccagcggtactttataacgctcaatcaaatcctcacgacctggcttaataaaccacggtgtgtactcagcaaaatgttctgacgattccgtgacgaaatagcccagctttttgaacatttcgtagcgcacaatattctggcagcgagtattgccatgaatattcggcttcggtgcctgccctgcttcataagccgccagcagttccgggtagagattcacataactgccgtcggcggttttgcgctccagctccaggtaaaacgccatatggttgatacctgcgcaacggtaacgcagcgtagctgggtcgatattgaggtcacgcgccaactcttccgccgttccctgcaccgaatggcacagcccgacctgtttgatatgcggatagcgggcatacatcgcccaggtattcatcgccattgggttaacatagttgagcatggtggcatcggggcagacttccgtcatgtcctcgcaaatttgccacagatgcggaatggtacgtagcgcgcgcataataccgcccggccccaacgtatcggcaatggtttgttccagaccatgccgcttacagacctcgaaatcagtcaccgtgcaaggttcataaccgccaatctgaaatgccaccacgacaaaatcggcatcctctaaggcttctttctgttgggtgtggcaggtgattttgccgctggcccctgctgaatccatcagcttacgcaccacaatatgcgactcttccaggcgggtggggtcaatgtccatcagggcaatatgcgccgttttcagcgcctcgcgatggaacacatcaccaagaatatttttaacgaaaatcgtcgaaccagcgccgataaatgtaattttgggtgcagacatcatgcagatctcctggcttgcttgaataacttcatcatggcaggcgaatctgcagaaaacctccggcttccaggttgagcattcccataaactcagatcctgcgtgaagcagcagtaaatctgagtttatgggaataaattacctgaaaagcagagttttcggcctcatgatactcggagagtcccctcgcccctctgggaagagggtgaaaaccgtgctcccactcgcagtcatcctccctcactcctgccataattctgatattccaggaaagagagccatccatgaatacagatacgtttatgtgcagcagcgacgaaaaacagacccgcagcccgctgtcgctgtattcggaataccagcggatggagattgagtttcgcgcaccgcatatcatgcccaccagccactggcatggtcaggtcgaagtgaatgtgcctttcgatggcgatgtggaatacctgatcaacaatgaaaaagtgaatatcaatcagggtcatatcacgctgttctgggcctgtacaccgcaccaactaacagataccggaacctgtcagagcatggcgatttttaatctgccgatgcatctgtttctctcctggccgctggataaagacctgattaaccacgtcactcacggcatggtgatcaaatcactggccacacagcaacttagcccgtttgaagtgcgccgctggcagcaggaattaaacagtccgaacgagcaaattcgccagctcgccattgatgaaattggcctgatgctcaagcgatttagcctctctggctgggaaccgattctggtcaataaaacctcgcgcacacacaaaaacagcgtctcgcgccatgcgcaattttatgttagccagatgctgggctttattgccgaaaactatgatcaggcgctgaccatcaacgatgtggctgagcacgtcaaacttaacgccaactatgcaatggggatattccagcgggtcatgcaattgacgatgaaacagtacattaccgcgatgcgcatcaaccacgttcgcgcgttactgagcgataccgataaaagtattctcgatattgccctgacggcaggctttcgttcaagtagtcgtttttacagcacgttcggcaaatatgtcggcatgtcgccgcaacaataccgcaaacttagccaacagcgccgccagacgtttcccggctaaagacgatatcagtatcagccaaaaaaatagtttagccgtcgataataagcagtgaaaataatttaaaataatcacataacgtattgtttataaaactaaatatttcaaaaatgtttgtttttcacgcgctttacagcccgaaaaggccggaagatacttgcccgcaacgaagattccttcataaccgggtaagcaatgatgaaagtattaattgttgaaagcgagtttctccatcaagacacctgggtcggtaacgccgttgagcgtctggcagatgctttaagccagcaaaatgttaccgtgattaaatccacctcctttgatgatggttttgccattctctcttcaaacgaagccattgactgcctgatgttcagctatcaaatggaacatccggacgaacatcaaaacgtcagacaattgatcggtaagcttcatgagcgccaacaaaacgtgccggtcttcctgttgggcgatcgggaaaaagccctcgccgcaatggatcgcgacctgctggagcttgtcgatgaattcgcctggattctggaagataccgccgactttatcgccggacgcgccgttgccgcgatgacccgctaccgccagcagctgttgccgccactgttcagcgcgctgatgaaatatagtgacatccatgaatattcctgggcagcgccaggccaccagggcggcgttggttttaccaaaacacccgccggacgtttctaccatgactactatggtgaaaatctgttccgcaccgacatgggcatcgaacgaacttccctcggttctttgcttgaccatactggcgcatttggcgaaagcgaaaaatatgccgcacgcgtatttggtgccgatcgctcctggtcggtagtcgtcggtacttccggctctaaccgcaccatcatgcaggcttgcatgaccgataacgatgtcgtggtcgttgaccgtaactgccataaatccatcgaacaaggtttgatgctgacaggcgcgaaaccggtctatatggtgccaagccgcaaccgctacggcattatcgggccaatctatccgcaggaaatgcaacctgaaaccttgcagaagaaaatcagtgaaagcccgctgaccaaagacaaagccgggcaaaaaccgtcttactgcgtggtgaccaactgcacctatgacggcgtgtgttataacgctaaagaagcgcaggatctgctggaaaaaacctccgatcgtctgcactttgacgaagcctggtacggctatgcacgtttcaacccgatctatgccgatcactatgccatgcgcggcgaacctggcgatcacaacggtcctaccgttttcgccacccactccacccacaaactgctgaatgcgctgtcacaggcttcttatattcatgtacgtgaaggtcgtggggcgattaacttctcccgcttcaaccaggcctacatgatgcatgccaccacctccccgctgtatgccatctgcgcatccaacgacgtggcggtgtcgatgatggacggcaacagcggcctgtcactgacacaggaagtgattgacgaagcggttgatttccgtcaggcgatggcgcggctatataaagagttcaccgctgacggtagctggttcttcaaaccgtggaacaaagaagtcgtcaccgacccacaaaccggcaaaacctatgactttgctgacgcaccaaccaaactgctgaccaccgttcaggactgctgggtaatgcatccgggcgaaagctggcacggcttcaaagatattccggataactggagtatgctcgacccgattaaagtcagcatccttgctccgggaatgggtgaagatggtgaactggaagaaaccggtgttccggcggcgctggtcactgcctggcttggtcgccacggcattgtacctacccgcaccactgacttccaaattatgttcctgttctctatgggcgtaacccgtgggaaatggggaactctggttaacaccctttgctccttcaaacgccactatgacgccaacacaccgctggcgcaggtgatgccggaacttgttgaacaatatcctgacacttacgcgaacatggggattcacgatctgggtgacaccatgtttgcctggctgaaagaaaacaaccctggcgcacggttgaacgaagcctattccggcctgccggtggcggaagtcaccccgcgtgaagcgtacaacgcgattgtcgacaacaatgtcgaactggtatccattgaaaatctgccaggacgcatcgcggcaaactcagttatcccgtatccgccaggaatcccgatgctgctgtctggtgaaaacttcggcgataaaaacagtccgcaagtaagttatttacgctcgctgcaatcctgggaccaccatttccctggatttgaacacgaaactgaagggactgaaattattgacggtatttaccacgttatgtgcgtgaaagcgtaaccactattccgctgaaggcgtaattgtttaaataacattacgccgcctggccttaggccttttgagtatggcaacgttttcataaaaattgctgcaaacaaaaatgtcatactttttgcgcggccccaccccgcgcttttttttgcctgttatttatcctgtaaaaaaatatgtacatgagaaattactataaaaatttgtactattagtaaaactcgttatttttatgcatgtttatattcatcatacaattatataaccatttcccggtatcgctttgctttagcgagaactggtcttttattcgcactcaggagtacatgtatgaggatttgcagcgaccaaccttgtattgttttattgactgaaaaagatgtctggataagggtgaatgggaaagaacctattagccttaaagctaaccatatggcgttattaaattgtgaaaataatattatcgacgtctcctctcttaacaacactttggttgctcatattagtcacgacatcatcaaagattacctccggtttctgaataaagatctctcgcaaataccagtatggcaacgtagcgctacgcccatactcaccctgccatgcctgacgccagacgtctttcgcgttgccgcgcaacacagcatgatgcccgcagaaactgagtcagaaaaggaacgaacacgcgcattattattcacggtgctatcccgttttctcgacagtaaaaaattcgtttcattaatgatgtatatgttacgtaattgtgtaagtgacagcgtttatcaaattattgaaagcgatattcacaaagactggaatcttagtatggtagccagttgtttatgtcttagcccaagtctgttaaagaaaaagttgaaaagcgaaaacaccagttatagccaaataatcaccacctgccgcatgcgttatgccgtaaatgaattaatgatggacggtaaaaatatctctcaggtatcacagtcctgcggctacaacagtacgtcgtactttatttctgtctttaaagacttctacggtatgacgccgctgcattatgttagtcagcacagagaacgcactgtcgcctgatttttaaccttaacgaagagctatattaataacggcatcagcgataacccggtcgataataattcaactatcgaatgcaggcgtatgatatgacgtaatttattgtcacgaagctcgccttcgcaggagtttaattatgtcttcggatgctgatgctcacaaagtgggcttaatccccgtcaccctgatggtgtcggggaatattatggggtcaggtgtttttctgttacctgcaaacctggcctctactggcgggattgccatttatggatggttggtgacgattatcggtgcactggggctctcgatggtatacgccaaaatgtcgttcctcgacccaagtcctggtggttcttacgcttacgcccgccgctgctttggcccgtttctcggttatcaaaccaacgtcctctactggctggcctgctggatcggcaatatcgccatggtggtcattggcgtaggatatttaagttacttcttcccgattctgaaagatccattggtattaaccatcacctgcgtcgtggtgctgtggatcttcgtcctgctgaacattgtcggtccgaaaatgatcacccgtgtgcaggcagttgccaccgtgctggcgctgatccccatcgtcgggattgccgtatttggctggttctggttccgtggtgaaacctatatggcggcatggaacgtcagcggcctgggcaccttcggtgcaattcaaagtacccttaacgttacgctgtggtcgttcatcggtgtggaaagtgcctccgttgccgcaggtgtggtgaaaaacccgaaacgcaatgtccctatcgccaccattggtggggtattgattgccgccgtttgctatgtactttctaccaccgcgattatggggatgatccctaatgccgcactgcgcgtttctgcttcgccattcggtgatgccgcacggatggcgttgggtgacaccgccggggccattgtttccttctgcgcagctgcgggttgcttaggttcactgggcggctggacgttgctggcgggtcaaacggcgaaagccgctgccgatgacggactgttcccaccgatttttgcccgtgtaaataaagcgggtacgccagtggcggggctgattatcgtcggtattttgatgaccatcttccagctcagcagcatttcaccaaacgcgaccaaagagttcggtctggtttcttccgtctcggtcatctttacactggtgccatatctttacacctgtgcggcgttactgctgctcggacacggtcactttggtaaagcacgcccggcatatctggcagttactaccattgccttcctctactgcatctgggccgtggtggggtccggagcgaaagaggttatgtggtcatttgtcaccctgatggtcatcaccgccatgtatgcgctgaattacaaccggctacataaaaacccgtatcccttagatgcaccaataagcaaagattaattccccttaatccagcaaacataaaagccaaccttaagaacttaaggttggcttaattttgctttgcgagcatatgcgcactttgttcgatggaaacaccgtgatgttgaagcgcctactaaaaagaccctctttgaatttactcgcctggctattgttggccgctttttatatctctatctgcctgaatattgccttttttaaacaggtgttgcaggcgctgccgctggattcgctgcataacgtactggttttcttgtcgatgccggtcgtcgctttcagcgtgattaatattgtcctgacactaagctctttcttatggcttaatcgaccactggcctgcctgtttattctggttggcgcggctgcacaatatttcataatgacttacggcatcgtcatcgaccgctcgatgattgccaatattattgataccactccggcagaaagttatgcgctgatgacaccgcaaatgttattaacgctgggattcagcggcgtgcttgctgcgctgattgcctgctggataaaaatcaaacctgccacctcgcgtctgcgcagtgttcttttccgtggagccaatattctggtttctgtactactgattttgctggtcgccgcactgttttataaagactacgcctcgttgttccgcaataacaaagagctggtgaaatccttaagcccctctaacagcattgttgccagctggtcatggtactcccatcagcgactggcaaatctgccgctggtgcgaattggtgaagacgcgcaccgcaacccgttaatgcagaacgaaaaacgtaaaaatttgaccatcctgattgtcggcgaaacctcgcgggcggagaacttctccctcaacggctacccgcgtgaaactaacccgcggctggcgaaagataacgtggtctatttccctaataccgcatcttgcggcacggcaacggcagtttcagtaccgtgcatgttctcggatatgccgcgtgagcactacaaagaagagctggcacagcaccaggaaggcgtgctggatatcattcagcgagcgggcatcaacgtgctgtggaatgacaacgatggcggctgtaaaggtgcctgcgaccgcgtgcctcaccagaacgtcaccgcgctgaatctacctgatcagtgcatcaacggcgaatgctatgacgaagtgctgttccacgggcttgaagagtacatcaataacctgcaaggtgatggcgtgattgtcttacacaccatcggcagccacggtccgacctattacaaccgctatccgcctcagttcaggaaatttaccccaacctgcgacaccaatgagatccagacctgtaccaaagagcaactggtgaacacttacgacaacacgctggtttacgtcgactatattgttgataaagcgattaatctgctgaaagaacatcaggataaatttaccaccagcctggtttatctttctgaccacggtgaatcgttaggtgaaaatggcatctatctgcacggtctgccttatgccatcgccccggatagccaaaaacaggtgccgatgctgctgtggctgtcggaggattatcaaaaacggtatcaggttgaccagaactgcctgcaaaaacaggcgcaaacgcaacactattcacaagacaatttattctccacgctattgggattaactggcgttgagacgaagtattaccaggctgcggatgatattctgcaaacttgcaggagagtgagtgaatgaaaattctgattgttgaagacgatacgctgttattgcagggactgattctggcggcgcaaaccgaaggctacgcgtgcgatggcgtgacaaccgcgcggatggcggaacaaagccttgaggcaggtcattacagcctggtggtactggatttagggttacccgacgaagatggactgcattttctcgcccgtatccggcagaaaaaatataccctgccggtactgatcctcaccgctcgcgatacgctgaccgacaaaatcgccgggctggatgtcggtgccgacgactatctggtgaagccttttgcgctggaagagttacatgcccgtatccgcgccctgctacgacgccataataatcagggcgaaagtgagctgattgttggcaatctgacgctgaacatgggtcgccgtcaggtatggatgggcggtgaagagttgattctgacgcccaaagaatatgctctgctgtcacggttaatgctcaaagcaggcagtccggtgcatcgggaaattctctacaacgacatctataactgggacaatgaaccctcgaccaacaccctggaagtgcatatccacaatctgcgcgacaaagtgggcaaagcccgtatccgcaccgtgcgcggctttggctatatgctggtcgcgaatgaggaaaactaattgaatctgatgcattttctgcgccgaccaatatcgctgcgccaacggctgatattgaccatcggggccattttgttggtgtttgagctgatcagcgtcttctggctatggcatgaaagtaccgagcagattcagctgtttgagcaggcgctacgcgacaatcgcaacaacgatcgccacatcatgcgtgagatccgcgaggcggtcgccagcctgattgtccccggcgtctttatggtcagcctgacgctatttatctgctatcaggcggtacgccgcatcacccgcccgctggcggagctgcaaaaagagctggaagcgcgcaccgccgacaacttaacgcccattgccattcacagcgccaccctcgaaatcgaagcggtggtttcggcgttaaacgatctggtcagtcgcctgaccagcacgctggataacgaaaggttgtttaccgctgacgtcgcgcacgaactgcgaacgccactggcgggggtgcgtttgcatctggaactgctggcgaaaacgcatcacattgatgtagcaccgttagtggcacggcttgatcagatgatggagagcgtctcccagctgctgcaactggcgcgtgccggacagtcattttcttccggtaattatcaacatgtaaaactgctggaagatgtcattctcccctcgtatgacgaactcagtaccatgctcgaccagcgacagcaaaccctgctattgccagagagcgccgccgacatcaccgttcagggtgatgcaaccctgctgcggatgttattgcgaaacctggtagaaaacgcccatcgttacagcccgcaaggcagcaacattatgattaagctgcaagaagatgacggagcggtcatggcagttgaagatgaaggaccaggtattgatgagagtaaatgcggggagttgagtaaagcgtttgtacgtatggacagccgttatggcgggattggtctggggttaagtattgtcagccgcattacacagttgcatcacgggcagtttttcctgcaaaaccggcaagagacttccggcacgcgggcctgggtacggctgaagaaagatcagtacgtggcaaaccagatataaagaaagctgctgaccaccagcacgctgaacacggtagttaaactttcataaacacggtttttcattgcactctcctccgttaacctggaggagagtatgcgcgtcagagattaagtgaaccttaagagttcaattggcctgataagacagcgtcacatcaggccatccgtttcagcttattcatcaattcgcggatgttgctgcaccaggcgggtacgtttcgcctgcaaatcggcaatctcgtggtcaatatcatcgattttctgctcgatattatcgtaatgctcgacgagaatttccttcgcttcctgtatatctgacgccgccggtgtcgcacctttcaacggacgatttgccgtctctttcatggttacgccggtgattaaaccaaccaccgccactaccatcaggtaataggcaggcatcatcagattctgcgagctttcgaccagccaggccgccagcgttggcgtcagaccggcaaccagcaccgaaatattaaatgccgccgccagcgcgctgtatcggatatgcgtcgggaacatcgctggcaaggtagaagccataacgcccgtaaagcagttaaggatcaccgccagcatcagtaacccggcaaaaatcaggccgatgacgttactgttaatcagaataaacgccgggatcgccaacacaaacagggcaacactaccaagtagcacaaacggacgacggccaaaacggtcactcagcaagcccatcaccggctggacaaacagcataccgatcataatggcgataataatcagcaccccgtggtcttcggagtaatgcaggttatgcgacaaataactcggcatataggtcagcaacatgtagtaagtcacgttggtggcaattaccagaccaatacatgtcaacaggctgcgccagtatttagtagcaatctctttaaacgagactttcgggccatcctgcaaaccttcgcggtcgccctgttccagtttttcaacatgctgctgaaacgccggagtttcttccagcgcatggcgcaggtaaagcccgataatccctaacggcagagcaataaagaacggaatacgccagccccagtcgaggaagttcgcttcgccgacaatggtcgaaattaacaccaccacgcccgcacccagcacaaacccggcaatagaaccgaagtccagccagctgcccataaagccacgtttacggtcaggtgagtattccgcaacaaatatcgacgccccggtatattcaccgccgaccgagaaaccttgtgccatcttacagatcaacagcagaatcggtgcccaaataccaatcgtgtcgtaggacggtattaagccaatacagaacgtactgatcgacataatcacaatagtgatagcgaggatcttctggcgaccatatttatcgcccaacataccaaagaagagcccgccaagcggtcgaatcagaaagggaacggagaaagtggcaagtgcagcaaccatctgcacgctggggtcagcccccgggaaaaaaactttacctaatgcgtaagcaacaaaaccataaacaccaaaatcaaaccattccattgcattacccagtgatgctgcggtaatggctttacgcagtttaccgtcatcaataatggtgacatcacgaagggtaattggttttacttttttccttttcagcatagctttcctcgcagagttggcccatttccgcaaacgccagaaaaatcagcgcgacggccgcaaaaggggagcgggaattgcaggatgcaatctctgtagcaagcgtagcgggtttgcttacaccctccggttaaggaatgtacaatcaaaccagttgacgcctgaattgggcagttaatgacctttttaccctaccagtgtttaaatttgtgatcaacttcacacatggatttcgtttaggactcattgatgtaactgattatttacgccaaatttacagagaagatttcctcgaccattgcccccaccaaacgctgcgctgaacagagtcgtggcatccccagcgcgactgtttgccagcgttgggtcactgaccagcaaacgggctgtttatctgccgtggtccactttcccagccaacttaaaaaatcagcatgctcccctcccgaagaggcaaaccactgatggtaatagtgacgcgtggtcggtgccgcattgatactctctgccagatgttgtgtcgctttcacgcgcaaatcacccagcaacaacgccaccgcttgcgggcttcccagacgacaggcatcgccaaatgccccccaacgcaactcttcgagaacgataaaacagcgcccaggcaacgaccaggcgttatacgccccagcacgccagcgggtaaaaatttgctcgctctgttcacccgcctgcaccagtaggcctcgttgcgttaacgccttttccttccagcgacaacgggctgaaaaccactcatacaaggcggcaatttgctgggggagctccgggaaagcagagtgctggcggtgatccattttttgcagcagcgccagatgctgcgcgatctgcgtcagtgccagatgaccgggatccagcatcgacgccagtttttccaccaatgtcagacgcaggctaagcggcgcatttaacatgccgccgttcgtccatgtctgaagctgcacacgcgaaagaagttcctgcatcagtcgttcacgaaactgctgctgatgggcttgtggaaggcgggcatcatcaccctgcgccagatccactaaaaagcggggataaaccgactccagcacgcgaccggggccgtcaagtaacgtcttggtcaatatcgttctgccgtgaaaagtgtttgaatatcatcgcgtaacagctgggcgtcggtgtaaatccagccgtgagtcatcacagtctgctgcaattgctgctgcatcagcctgaccaccgattcattttgttgacgcagagccagactttcgcgtaaacgcgtctgtaattccgtcaaacatgaagcgaactcagcgaaaaaagtattcatgcctgccgtaacagattcatcgacctgctctgccagaactttagccatttgttggcaatagagatcgacttctgcgcttaatgctcgttgcaacacactgtaatcaaccgtttctgtcggtgatttctcatttccccgtccccagtcgggctgattcaaccagcgcgaaaaagtctcacgcacaacgcctaaacgcgtgctctgctcgtccgttgcttcctggcgcgaaatgacttcactgaacagctggcgagtgttgaagtggggaactacgccgtgaaaaacaggaaaatgaaacccaggacgaaaccctgactcgctcaattccattttgacttgttgctcaatggggcgaataacatcggttaacacccggcaaagggtggattcaagctcggcaaaacgcagcgtaaagtcgcgactgatggtgttctgcgccgtctgtaacagtgtctcacagcgggtacgaatctcgcttaacggctccgaatcatcctgaaacaaggcggctaactgcaccttcagcgcatcttgctgttgacgcagaaagtggttggcggaggtcagggccagctcgatttcatgtttaatctcgccgctcacctgcgcctgattgagttgcaatagctgcaaactttcttcgatctggtggatattttgccgcaattgttcacaagcgacgtttaacccgtgcgcacgaaaatccaggtattcccgcgcctgctgcgcgtaattcaacagtttatgcgcggcagatcgcagagcatacaacgaggcgttagcgtaagcggcatgaagcaacgcctgaattggctgggcgaacagcgaatcttcccacaactgatcggcagcatgacgaatatgttcgaggtccgccagatcggcatgacgccagcgcctgccaagcgcggcatgggcaaaatcttccacccagcgttgttgctctggcggtggtaacttaccgttgttggctaactcatagcgcgcccgattcgccaggtagccccacatcgacgacaccggaaatatctgctgtggcgtaatacagcctttcatcagcgtcccggaaatcagtgcccgcacctggtcggcgtcgtcactgttacgatcctgttgatcgaacttattgaccagcacgtacagcggcaccgattgccccaccgccaaaatcgcctcacggacctcttcatcggagatcgatttcagttgcgtataatccagcaccgccagtaccgccgaggcgcgtgccagctgctggttaagcattttttgcagatgcggttgcccggcttcatttggcccgggggtatccagtaacgtcaactgaccgggataactctccagccccgctagatggacaaactccacttcaatcacgggaatatgctcaatggcggcgtaagcagaaaaaggaaaatcgacgtccagcgccttcgccagtcgcactaaatcattcaaacttttcagacaatgaaaaataggctgggcacccagataatatttttcgaaagcgacgccattttcgatccgctgcataagcgcacgcatatctttatctatttccagcacatcggtcagatgcttaatatcgcaatcacgcaggcgctgttgtaattgttgaattaaacaatcgattggcgcgacatgtgaaaaatgcagtaccggttccttttgcccgggcgtatggcgaataagcgtcggcagcgcagtcattgggcgattacgattaggcagaacctccgtaccaacaatggcattaatggtggttgatttccctgctttcatggtaccgacaattgcaagcaccatttccagtcgggaaattttacgcaactcattattcagcatcgcgtgacgttcggcgatattaggctgactccagggtaaagccagttgtggcgcgtcgtctccgggtacagagagaggcattttttccagtaactgcaactgttggcgagaaagctgtaacaggcgttcagcctcctgacttaactcatacagggtctgtgtgtacatagaaaattcttccttaaagcaaattttgttattttatttagccagattgtttttgagttctgttttcggcttttataattactgcaagaaataattttatatttagtgtgttgttttttatcagaataaataacgtcttctgatacgtttaaaacgtcagaaagataaaaatatcatgtgaattaaaaaaagaacaagtagagcattaacattatcttaaataataaatagaggcaaaaagattattttctttttgcgtttcctttcaaatgaaaacgatcgtcgtctaaaatcagcagtacccccgacaaactcagggattttgtgtataattgcggcctttttcggcaatctgccgttttttggcgcttttgccctgctgacttttgaggaaatccacatgtcattaccacactgcccaaaatgcaactccgaatacacctacgaagataacggcatgtacatctgcccggaatgtgcctacgaatggaacgacgcagaacctgcacaggaaagcgacgagctgatcgttaaagatgctaacggcaatctgctggctgacggcgacagcgttaccatcattaaagatctgaaggtgaaaggtagctcttcgatgctgaaaattggcaccaaagtgaaaaacatccgcctggttgaaggcgaccataacatcgattgcaaaatcgacggttttggtccgatgaaactgaaatctgagtttgtgaaaaagaactgattgtattgtgatcggtaagccggataaggcgctcgcgccgcatccggcaacggtgccagatgcctgatgcgacgcttgcgcgtcttatcaggcctacaaattcccgcaccctccgtaggccggataaggcgtttacgccgcatccggcaacggtgccgactgcctgatgcgacgcttgcgcgtcttatcaggcctacaaattcccgcaccctccgtaggccggataaggcgtttacgccgcatccggcaacagtgccaactgcctgatgcgacgcttgcgcgtcttatcaggcctacaaattcccgcaccatccgtaggccggataaggcgtttacgccgcatccggcaatggtgccgactgcctgatgcgacgcttgcgcgtcttatcaggcctacaaattcccgcaccctccgtaggccggataaggcgtttacgccgcatccggcaacagtgccgactgcctgatgcgacgctcgcgcgtcttatcaggccgcctctcatctgtataaatttcgaactacacttaactggcttctcttaactgaggtcaccatcatgccgttaagtccctacctctcttttgccggtaactgttccgacgcgattgcctattatcaacgtacgttgggcgcggaactgctctataaaatcagcttcggcgaaatgccaaaatcagcgcaggacagcgccgagaactgcccttccggaatgcaatttcccgataccgccatcgcccacgccaatgtacgcattgccggaagcgacatcatgatgagcgatgccatgccgtcaggaaaagccagctactccggctttacgctggtgctcgattcgcaacaggtcgaagaaggaaaacgctggtttgacaatcttgccgctaacggaaaaatcgaaatggcctggcaggaaactttctgggcgcatggctttggcaaagtcaccgataaatttggcgtaccgtggatgattaatgtcgtcaaacaacaaccaacgcaataacccgccgggaggcccgccctcccgcactgtcatcgaattcccgttaactcttcatctgttagtcacttttaattaaccaaatcgtcacaataatccgccacgatggagccacttttttagggaggctgcatcatgcaaacgattatccgtgtcgagaagctcgccaaaaccttcaatcagcatcaggcgctgcatgcggttgatctgaacattcatcacggtgaaatggtggctctgcttgggccgtcgggttccggaaaatccacccttttacgtcacttaagcggtttgattaccggcgataaatctgtcggtagccatatcgagctgctgggccgcacagtccagcgcgaaggccgcctggcccgcgatatccgcaaaagccgcgcccataccggctacatattccaacaattcaacctggtgaaccgcctgagcgtactggagaacgtgctgattggcgcgctcggcagcacgccgttctggcgcacctgttttagctggttcaccggcgagcagaaaaagcgcgcgttacaggcgctgacccgcgttggcatggtgcattttgcccatcagcgcgtttccaccctctccggcggccagcagcaacgtgtggcgattgcccgtgcgctgatgcagcaggcgaaagtgattctggccgatgaacccatcgcctcgctggacccagaatcagcgcgcatcgtgatggacaccctgcgcgacatcaaccagaacgacggcatcaccgtggtcgtcacgctgcatcaggtggattacgccctgcgctactgcgaacgcatcgtcgccctgcgtcaggggcacgtcttctacgacggcagcagccaacagtttgataacgaacgttttgaccatctctaccgcagcattaatcgcatcgaagagaacgcgaaagctgcctgacatccccatcattgaggaaaacgaatgaacgctaagataattgcctcgctggccttcaccagcatgttcagcctcagcaccctgttaagcccggcacacgccgaagagcaggaaaaggcgctgaatttcggcattatttcaacggaatcacagcaaaacctgaaaccacaatggacgccgtttttacaggatatggagaagaagcttggcgtgaaggtgaacgccttctttgccccggactacgcgggcattatccagggaatgcgcttcaacaaagtggatatcgcctggtacggcaacctgtcggcaatggaagcggtggatcgcgccaacggccaggtctttgcccagacggtcgcggcggatggatcgccgggttactggagcgtgttgatcgtcaacaaagatagcccgatcaacaacctgaacgatctgctggcgaagcggaaagatctcaccttcggcaatggcgatcctaactccacctctggcttcctcgtccccggttactacgtcttcgccaaaaacaatatctccgccagcgacttcaagcgcaccgtcaacgccgggcatgaaaccaacgcgctggccgtcgccaacaagcaggtggatgttgccaccaacaacaccgaaaacctcgacaagctgaaaacctccgcgccagagaagctgaaagaactgaaggtgatctggaagtcgccgctgatcccaggcgatccgatcgtctggcgcaaaaatctgtccgaaaccaccaaagacaagatctacgacttctttatgaactacggcaaaacgccggaagagaaagcggtgctggaacgcctgggctgggccccgttccgcgcctccagcgacctgcaactggtgccgattcgccagctcgcactgtttaaagagatgcagggcgtaaaaagcaataaaggactgaatgagcaggacaagctggcaaaaaccaccgagattcaggcgtagctggatgacctggaccgcctgaacaacgcgttaagcgcgatgagttcggtgagtaaagcggtgcagtaaatcgtaggtcggataagacgccccggcgtcgcatccgacaatgtgcaggcgttgatgccggatgcggtgcaagcaccttatccggcctacagaccggagccaaacatgcaaaccatcaccatcgccccacccaagcgcagctggttctcgcttctgagctgggccgttgttctcgccgtgctggtcgtctcgtggcagggcgcggaaatggccccgcttacgctgattaaagacggcggcaacatggcaaccttcgctgccgacttcttcccgcccgatttcagccagtggcaggattacctcaccgaaatggccgtcacgctgcaaatcgccgtctggggcaccgcgctggcggtggttctctccatcccctttggcctgatgagcgccgaaaacctggtgccgtggtgggtttaccagcccgttcgccgcctgatggatgcctgccgcgccattaacgaaatggtcttcgccatgctgttcgtggttgccgtcggcctcggcccattcgctggcgtgctggcgctatttattcacaccaccggcgtgctctccaagctgctttccgaagcggtggaagcgattgaacccggcccggtggaaggcattcgcgccaccggtgccaacaagctggaagagatcctttacggcgtgctgccacaggtgatgccgctgctgatctcctactccctctatcgtttcgaatccaacgtccgctcggcgaccgtcgtcggcatggtcggtgcaggcgggatcggcgtcaccctgtgggaagcgattcgcggtttccagttccagcaaacctgcgccctgatggtgctcatcatcgtcacggtcagcctgctggatttcctctctcaacggttgcgtaagcactttatctgataagcgaggcattgatagctatgcacttgtctacacatccgaccagctacccaacacgctatcaggagatagccgcaaaacttgagcaggagcttcgtcaacactaccgctgcggcgactatcttcccgccgagcagcaactggcggcgcgctttgaggtgaaccgccacaccctgcgccgcgccatcgaccagctggtggaaaaaggctgggtacagcgccgtcagggcgtcggcgtactggtgctgatgcgcccgttcgattacccgctcaacgcccaggcgcgttttagccagaacctgctggatcagggcagccatcccaccagcgaaaaactgctgtctgtgctgcgcccggcctccggtcacgttgctgacgcgctggggattaccgagggcgagaacgttatccacctgcgcaccctgcgtcgggtcaacggcgtcgcgctctgtttaatcgaccactactttgcggacctcgccctctggccgacgctgcaacgcttcgacagcggctcgctgcacgattttctgcgcgagcaaaccggaattgcgctgcgccgcagccagacgcggatcagcgcccgccgcgcccaggccaaagagtgccagcgtcttgaaatcccgaatatgtcgccgctgctgtgcgtgcgcacccttaaccaccgtgacggtgaaagcagcccggcggagtactccgtcagcctgacgcgcgccgacatgattgaattcactatggagcactgaatgcacgcagataccgcgacccgccagcactggatgtccgtactggcgcacagccaaccgactgagctggcagcccgcctgaacgcgctgaacatcaccgccgactatgaagtaatccgcgccgctgaaaccggcctggtgcagattcaggcgcggatgggtggcaccggcgaacgcttttttgctggcgacgccacgctcacccgcgccgccgtacgcctgactgacggcacgctcggctacagctgggtgctggggcgcgacaaacagcacgccgaacgctgcgcgctgatcgacgcattgatgcagcaatctcgccattttcaaaacttatcagaaacccttattgccccgctgaacgctgaccgtatggcacgcattgccgcacgccaggccgaagtaaacgccagccgggtcgacttctttacgatggttcgcggagataacgcatgaccctggaaaccgcttttatgcttcccgtgcaggatgcccagcacagttttcgtcgcctgttaaaggccatgagcgagccgggcgtgattgtcgccctgcatcagctcaaacgcggctggcagccgctgaatatcgccaccaccagcgtgctgctgacgctggccgataacgacacgccggtgtggctttctgcgccattaagtaacgatatcgtcagccagagcctgcgttttcataccaacgcgccgctggtcaatcagccggaactggcgaccttcgcggtaacggatgaggcgatttccagcgaacagcttaacgccctttccagcggcaccgctgttgcgccagaagcgggcgcgacgctgattttacaggtcgtcagcctgagcggcgggcgcatgctgcgccttactggcgcgggtattgccgaagaacgaatgatcgccccgcagctgccggagtgcattctgcacgaacttaccgagcgcccgcacccgttcccgctcggcatcgacctgatcctgacctgcggcgagcgcctgctggctatcccgcgaaccactcatgtggaggtatgctgatgtacgttgccgtgaaagggggcgagaaggcgatcgacgccgcccacgccctgcaagagagccgacgccggggcaataccgatttgcctgaactgagcgtcgcccagattgaacagcagcttaatcttgcagtagatcgcgtgatgaccgaaggcggcattgccgaccgcgaactggcggcgctggcgctgaaacaggccagcggcgataacgtcgaagcgattttcctgctgcgcgcctaccgcaccacgttggcgaagctggcggtaagcgagccgctcgacaccaccgggatgcgtctcgaacggcgtatctccgccgtttataaagacattcccggcggccagctgcttggcccaacctacgactacacccatcgcctgctcgatttcaccctgctggcaaacggtgaagcgccgacgctgaccaccgccgacagcgaacaacagccgtcgccgcacgttttcagcctgctggcgcgtcaggggctggcgaagtttgaagaagatagcggcgcacagccggatgacatcacccgcacgccgccggtttacccctgctcacgttcttcccgtttgcagcagttaatgcgcggcgacgaaggctatttgctggcgctggcctactccacccaacgcggttacgggcgcaaccacccgttcgcgggcgaaatccgcagcggctatatcgacgtatcgattgtgccggaagagctgggatttgcggtgaacgtcggcgaactgctgatgaccgagtgtgaaatggtcaacggttttatcgacccgccggatgagccgccgcacttcacgcgcggctacgggctggtgttcggcatgagcgagcgcaaagcgatggcgatggcgctggttgaccgcgctctgcaagccccggagtacggcgagcacgcggcaggcccggcgcaggatgaagagttcgtgctggcgcatgccgacaacgtcgaagccgcaggctttgtctcgcacctcaaactcccgcactacgtcgatttccaggccgaactggagctactcaaacgtctgcaacaggagcagaaccatggctaatctgagcggctacaactttgcctacctcgacgagcagaccaaacgcatgatccgccgcgccatcttaaaagcggtggcgatccccggttatcaggtaccgtttggcgggcgcgagatgccaatgccgtacggctggggaaccggcggcatacagcttaccgccagcgtgattggcgaaagcgacgtgctgaaggtgattgaccagggcgcggatgacaccaccaacgccgtatcgattcgcaacttcttcaagcgcgtgaccggggtaaacaccactgaacgtacggacaatgcgacgcttatccagacgcgccatcgcatccccgaaacgccgctgaccgaagatcagatcattattttccaggtgccgatccccgaaccgctgcgctttatcgagccgcgcgaaacggagacccgcactatgcacgcgctggaggagtacggcgtgatgcaggtgaaactgtatgaagatatcgcccgcttcggtcatatcgccaccacctatgcctatccggtgaaggtgaacgggcgctacgtcatggacccgtcgccgatcccgaaattcgataacccaaaaatggacatgatgcccgccctgcagctgttcggcgcggggcgcgagaagcgcatctatgcggtgccgccgtttacccgcgtggaaagcctcgatttcgacgatcacccgttcaccgttcagcagtgggatgagccgtgcgccatctgcggatcgacccacagctatcttgatgaagtggtgctggatgacgccggaaaccgcatgtttgtctgctccgataccgattattgccgccaacagagcgaggcaaaaaaccaatgaatcaaccgttactttcggtcaataacctgacccacctttacgcgccgggcaaaggctttagcgatgtctcttttgatttatggccgggggaagtgctgggcattgtcggggaatccggctccgggaagaccacgctgctgaaatcaatctccgcccgtctgacgccgcagcagggggagattcactatgaaaaccgttccctctatggcatgagcgaggccgaccgccgtcgcctgctgcgcaccgaatggggcgtggtgcatcagcatccgctcgacggcctgcgccgccaggtgtcggcaggcggcaatatcggcgagcggctgatggcgaccggggcgcgacattacggtgatattcgcgccaccgcgcagaagtggctggaagaggtggagattcccgccaaccggatcgacgacctgccgaccaccttttccggcggcatgcagcagcgtttgcagattgcccgcaacctggtgacgcatccgaagctggtgtttatggatgaaccgaccggcgggctggatgtgtcggtgcaggcgcgcctgctcgacctgctgcgcggcctggtggtggaactgaacctcgcggtagtgattgtcacccacgatttaggcgtcgcccgcctgctggcggaccgtttgctggtgatgaagcaggggcaagtggtggagagtgggttaaccgaccgcgtgctcgacgacccgcatcatccgtatacacagctgctggtgtcatcggttttgcagaattgagccggtgccggatgcggcgtaaacgccttatctggcctacaaatgcgctccccgtaggtcggataagacgcatcagcgtcgcatccgacacccgaaccacgaggcgaaaaatgattaacgtacaaaacgtcagtaaaaccttcatcctgcaccagcaaaacggcgtgcgcctgcccgtcttacaacgcgcctcactcaccgtcaacgcgggcgaatgcgtggtgctccacggccactccggcagtggaaaatcaaccctgctacgctcgctgtacgccaactatctgcccgacgaagggcaaatccagatcaaacacggcgacgaatgggttgacctggtcaccgcgccagcgcgcaaagtggtggaaatccgcaaaaccaccgtcggctgggtgagccagtttctgcgcgttatcccgcgcatttcggcgctggaagtagtaatgcagccgctgctcgataccggcgtaccgcgtgaagcctgcgccgctaaagccgcgcgtctgctcacccgcctgaacgtgccggaacgcctgtggcaccttgcaccatcgaccttctccggtggcgaacagcagcgcgtcaacatcgcccgcggctttatcgtcgactaccccattctgctgctcgacgaacctaccgcctcgctggacgccaaaaacagcgccgccgtagtcgagctgattcgcgaagccaaagcccgtggcgcggccatcgtcggcatcttccatgacgaagccgtacgtaatgacgtcgctgaccgcctgcatccaatgggagcctcttcatgattatcaataacgtcaaactggtgctggaaaacgaggtggtacacggttcgctggagatgcaggacggtgaaatccgcacctttgccgaaagccagagccgcctgccggaggcgatggacggcgaaggcggctggctgctgccgggcctgattgagctgcataccgataatctggataaattcttcaccccgcgcccgaaggtcgactggcccgcccactcggcgatgagcagccacgacgcgctgatggtggcaagcggcatcaccaccgtactggatgccgtggcgattggtgatgtgcgcgacggcggcgatcggctggagaatctggagaagatgatcaacgccatcgaagagacgcagaaacgcggcgtcaaccgcgccgagcaccgcctgcacctgcgctgcgaactgccacaccacaccacgctgccgctgtttgaaaaactggtgcagcgcgaaccggtgacgctggtgtcgctgatggaccactcgccgggccagcgccagttcgctaaccgcgagaagtatcgcgaatattatcagggcaaatactccctcaccgatgcgcagatgcagcagtatgaagaggaacagctggcgctcgccgcacgctggtcgcagccgaatcgcgaaaccatcgccgccctgtgccgcgcacgacaaattgccctcgccagccacgatgacgccacgcacgcccacgttgccgaatcccaccagcttggcagcgtgatcgccgaatttcccaccacgtttgaagcggcggaagcttcgcgcaggcatggcatgaacgtgctgatgggcgcgccgaatatcgtgcgcggcggttcgcactccggcaacgtggcggccagtgaactggcgcagcttggcctgctggatatcctctcttccgactactaccccgccagcctgctggatgcggcgttccgcgtcgccgatgaccagagcaaccgctttacgctgccgcaggcggtgaagctggtgaccaaaaatccggcgcaggcgctgaatcttcaggatcgcggggtgattggcgagggcaaacgcgccgacctggtgctggcgcatcgcaagggcaatcacattcatatcgaccacgtctggcgtcaggggaaaagggtgttctgatgacgggaaaactgatttggttaatggggccgtccggctccgggaaagacagcctgctggcggaactccgcctgcgggaacagacgcagctactggtggcgcatcgctacatcacgcgcgatgccagcgccggaagtgaaaaccatatcgccctgagtgagcgggagtttttttcccgcgcggggcaaaatctgctggccttaagctggcacgctaacggtctgtattatggcgtcggcgtcgagattgacctctggctgcacgccggattcgacgtggtggtcaacggttcacgcgcgcatttgccgcaggcacgggcgcgctatcaatcggcgctgctgcccatttgcttacaggtgtcgccggagatcctgcgccagcgtctggaaaaccgtggccgtgaaaacgccagtgaaattaacgcccgcctggcgcgcgccgcccgctatactccacaggattgccatacgctcaacaatgacggcagcctgcgccagtcggtcgacacgctgctgacgctgattcatcagaaggagaaacaccatgcctgcttgtgagcttcgcccggccacgcagtacgataccgacgcggtttacgcgctgatttgtgagctaaaacaggcggagtttgaccaccacgcatttcgcgtgggctttaacgccaatctgcgcgacccaaacatgcgctaccatctggcgctgctggatggcgaagttgtcggcatgatcggcctgcatttgcagtttcatctgcatcatgtcaactggatcggcgaaattcaggagttggtggtgatgccgcaggcgcgcggtctgaacgtcggcagtaagttactggcgtgggcagaagaagaagcccgccaggccggggccgaaatgaccgagctttcgaccaacgtgaagcgccacgacgcgcaccgtttttacctgcgtgaaggctacgagcagagccacttccgcttcaccaaggcgctgtaacatgagcctgaccctcacgctcaccggcactggcggcgcacagggcgttccggcatggggctgcgggtgcgcggcctgcgaccgagcgcggcgctcaccgcagtatcgccgccagccatgcagcggcgtagtgaagtttaacgacgcaatcaccctgatcgacgccgggctgcacgatctcgccgatcgctggtcgcccggatcgttccaacagtttttgctgacgcattatcatatggatcacgtccaggggctgtttccgctgcgctggggcgttggcgatccgatcccggtttacggcccgccggatgaccagggttgcgacgatctgtttaaacatccgggcctgcttgatttcagccacacagtggaaccgtttgtggtgtttgatttgcaggggttgcaggtcacgcccctgccgcttaaccactcaaaactgaccttcggttatctgctggaaacggcacatagccgggtggcgtggctgtctgacaccgctggcctgccggaaaaaacgctgaaatttttactcaataatcatccgcaggtgatggtgattgattgcagtcacccgccgcgcgcggatgcaccgcgtaatcactgtgatttaaataccgtgcttgcgctgaatcaggttatccgctcgccacgggtgattctgacccatatcagccaccagtttgatgcgtggctgatggaaaacgcactaccgtcagggtttgaggtggggtttgatgggatggagattggggtggcgtgatgagagggaatgtgcgcgctggccccctcaccctaaccctctccccagaggggcgaggggaccgattgtgctcgatattgaatattgcgctggttttctccctctccccattggggtgaggggcgatgcctgctccatacccaacatcattgcccatactcatcttccattctccgctcttcatcttctagctgccgacgctcctgatcaagctggcgctggcgatcgtccagctgcctgcggcgatcttcaaactggcggcggcggtcgtcatattgtctgcgccgatcgtcgctcacttcacgctgccagccgtcgtcgcgcgaatcttcatagtctcgcccacggtcagggttataagcgtcattaatcgcctgctgaatattgccaatggtgtcgtcgataatatcggcctgggccggaacggtggacagcgtgagcagggtgaataaaagaaatagcggaaagcgtttcattagccaacctcaaaaagaaactctatccacattaatcattactcatccatgcaagtagtggatgaatctcaatttctccgctgctctattgccgtaatcgcctccacgcgttgttgatgacgaccgccttcgtactgtgcgcccagccacgcatccacaatcatttttgccagttcgaggccaaccactcgtgaaccaaaagccagcacgttggtgtcgttatgctgccgcgaaagttgcgcggaataaggttcgctacagacgaccgcgcgaattccggcaaacttgttcgccgctatcgaaataccgacgccagtaccacaaatcaaaatcccgccatcaacctctccgccagcaacagccagtgcgacttgactggcgtaatgtggataatcagtacgctctgacgaccaggttcctttatcaatcacttcaacgccacgctcaactaaatgtgccactatttcatgttttaaaatgaaaccgacatgatcacagccaaatgcaatctttttcattcatcttccccgtccgtgcaaaacttcacaatcaaaaaacatttgtgatgttaatgaattaaaaacacccaaaatcgatgaattacgccttcctgatctgttttacagagttacatctgacagcgcaatagcgttaaagacactcaccatccagcaacatctatcatctaaaaaaccagaaaaacaaataacatcatgtttttaaactaattaaatgaaataaaattttaagccactcgccattgttcacaataaaataaactttataaattttatttttttgtgaagtcgccagcatcttttctgttcttgctgtggtgatatagtggcgtcttcaattcaaggacaagagaacgtgatgagccagtcagagtttgattcagcgcttccgaacggtatagggttagcgccttacctgcgaatgaagcaggaaggaatgacagaaaatgaaagccgcatcgtggagtggttactcaaacccggtaacctgagttgtgcacccgcaattaaagatgtcgcagaagctctggcggtatctgaagcgatgatagttaaggtatcaaagctgctggggtttagcggctttcgtaacttacgcagtgcgctggaagattatttttctcagtcagaacaggtattgccttccgagttggcttttgatgaagcgccgcaggatgtggtgaataaggtatttaacatcactttacgcaccattatggaaggtcagtcgatcgtcaacgttgatgagatccaccgtgccgcccgctttttctatcaggccagacagcgggatttgtacggtgccggaggatcaaatgctatctgtgctgatgtacagcacaagttcttgcgcattggcgtacgctgtcaggcctatcctgatgctcacatcatgatgatgtccgcttcgttgttacaggaaggagatgttgtgctggtagtgacccattccgggcgaaccagtgatgtaaaagcggccgtagaactggcaaaaaagaacggggcaaagattatttgtataacccatagctaccattcaccgatagcgaaactggccgattatattatttgctcaccagccccggaaacgccgttattaggtcgtaatgcctcggcaagaatattacaactaactttgctggacgctttttttgtctctgtcgcccagctcaacattgaacaagctaatattaatatgcaaaaaaccggcgcaattgttgatttcttctcaccaggcgcgctgaaataagaaaaaggtaattccgccatcgcggagttacctgtccccttaccgtgagaacattattatgaataaatatctgaaatatttcagcggcacactcgtgggcttaatgttgtcaaccagcgcttttgctgccgccgaatatgctgtcgtattgaaaaccctctccaacccattttgggtagatatgaaaaaaggcattgaagatgaagcaaaaacactgggcgtcagcgttgatatttttgcctctccttcagaaggcgattttcaatctcaattgcagttatttgaagatctcagtaataaaaattacaaaggtatcgccttcgctccattatcctcagtgaatctggtcatgcctgtcgcccgcgcatggaaaaaaggcatttatctggttaatctcgatgaaaaaatcgacatggataatctgaaaaaagctggcggcaatgtggaagcttttgtcaccaccgataacgttgctgtcggggcgaaaggcgcgtcgttcattattgacaaattgggcgctgaaggtggtgaagtcgcaatcattgagggtaaagccggtaacgcctccggtgaagcgcgtcgtaatggtgccaccgaagccttcaaaaaagcaagccagatcaagcttgtcgccagccagcctgccgactgggaccgcattaaagcactggatgtcgccactaacgtgttgcaacgtaatccgaatattaaagcgatctattgcgcgaatgacacgatggcaatgggtgttgctcaggcagtcgcaaacgccggaaaaacgggaaaagtgctggtcgtcggtacagatggcattccggaagcccgcaaaatggtggaagccggacaaatgaccgcgacggttgcccagaacccggcggatatcggcgcaacgggtctgaagctgatggttgacgctgagaaatccggcaaggttatcccgctggataaagcaccggaatttaaactggtcgattcaatcctggtcactcaataaaactgaatgatgccggatgatgatgctaatgaagtgtcttatccggccaacaaaataacctgaacgtagacctgataaatgtagccatcaggcaataatacgatatttcgtgcagagaggttatttatggccacgccatatatatcgatggcggggatcggcaagtcctttggtccggttcacgcattaaagtcggttaatttaacggtttatcctggtgaaatacatgcattactaggagaaaatggcgcgggtaaatccacgctaatgaaagttttatccggaatacatgagccgaccaaaggcaccattaccattaataacattagctataacaagctggatcataaattagcggcacaactcggtatcgggattatttatcaggaactcagcgttattgatgaattaaccgtactggaaaatttatatattggtcgtcatctgacgaaaaaaatctgtggcgtcaatattatcgactggcgagaaatgcgtgtccgcgccgccatgatgttattacgcgtgggcttgaaagttgatctagatgagaaagtggcgaatttatctatcagccacaagcagatgctagaaattgccaaaacgctgatgctcgatgccaaagtcatcatcatggatgaacccacctcctcactcaccaataaagaggtggactatctgtttctgatcatgaatcagttgcgtaaagagggtacggccatcgtctatatctcgcataagttggcggaaattcgccgtatttgcgaccgctatacggtgatgaaagacggcagcagcgtttgcagcggcatagtaagcgatgtgtcaaatgacgatatcgtccgtctgatggtaggccgcgaactgcaaaaccgttttaacgcgatgaaggagaatgtcagcaaccttgcgcacgaaacggtttttgaggtgcggaacgtcaccagtcgtgacagaaaaaaggtccgggatatctcatttagcgtctgccggggagaaatattaggctttgccggactggtcggttccggacgtactgaactgatgaattgtctgtttggcgtggataaacgcgctggcggagaaatccgtcttaatggcaaagatatctctccacgttcacccctggatgccgtgaaaaaagggatggcttacatcactgaaagccgccgggataacggttttttccccaacttttccatcgctcagaacatggcgatcagccgcagtctgaaagacggcggctataaaggcgcgatgggcttgtttcatgaagttgacgagcaacgtaccgctgaaaatcaacgcgaactgctggcgctgaaatgtcattcggtaaaccagaatatcaccgaactctccgggggaaatcagcagaaagtcctgatctccaaatggctgtgctgttgcccggaagtgattattttcgatgaacctacccgcggcatcgacgttggcgcgaaagccgaaatttacaaagtgatgcgccaactggcggacgacggaaaagtcatcctgatggtgtcatctgaactacctgaaattatcaccgtctgcgaccgcatcgccgtgttctgcgaaggacgactgacgcaaatcctgacgaatcgcgatgacatgagcgaagaggagattatggcatgggctttaccacaagagtaaaaagcgaagcgagcgagaagaaaccgttcaactttgcgctgttctgggataaatacggcaccttttttatcctggcgatcatcgtcgccatctttggttcgctgtcaccagaatattttctgaccaccaataatattacccagatttttgttcaaagctccgtgacggtattgatcggcatgggcgagtttttcgctatcctggtcgctggtatcgacctctcggttggcgcgattctggcgctttccggtatggtgaccgccaaactgatgttggcaggtgttgacccgtttctcgcagcgatgattggcggtgtactggttggcggcgcactgggggcgatcaacggctgcctggtcaactggacggggctacacccgttcatcatcacccttggcaccaacgcgattttccgtgggatcacgctggtgatctccgatgccaactcggtatacggcttctcatttgacttcgtgaacttctttgccgccagcgtaattgggatacctgtccccgttatcttctcactaattgtcgcgctcatcctttggtttctgacaacgcgtatgcggctcgggcgcaacatctacgcactgggcggcaacaaaaattcggcgttctattccgggattgacgtgaaattccacatcctggtggtgtttatcatctccggtgtttgtgcaggtctggcaggcgtcgtctcaactgcacgactcggtgccgcagaaccgcttgccggtatgggttttgaaacctatgccattgccagcgccatcattggcggcaccagtttcttcggcggcaaggggcgcattttctctgtggtgattggcgggttgatcatcggcaccatcaacaacggtctgaatattttgcaggtacaaacctattaccaactggtggtgatgggcggattaattatcgcggctgtcgcccttgaccgtcttatcagtaagtaaggaattgaacatgaaaatctccccctcgttaatgtgtatggatctgctgaaatttaaagaacagatcgaatttatcgacagccatgccgattacttccacatcgatatcatggacggtcactttgtccccaatctgacactctcaccgttcttcgtaagtcaggttaaaaaactggcaactaaaccgctcgactgtcatctgatggtgacgcggccgcaggattacattgctcaactggcgcgtgcgggagcagatttcatcactctgcatccggaaaccatcaacggccaggcgttccgcctgattgatgaaatccgccgtcatgacatgaaagtggggctgatccttaacccggagacgccagttgaggccatgaaatactatatccataaggccgataaaattacggtcatgactgtcgatcccggctttgccggacaaccgttcattcctgaaatgctggataaacttgccgaactgaaggcatggcgtgaacgagaaggtctggagtacgaaattgaggtggacggttcctgcaaccaggcaacttacgaaaaactgatggcggcaggggcggatgtctttatcgtcggcacttccggcctgtttaatcatgcggaaaatatcgacgaagcatggagaattatgaccgcgcagattctggctgcaaaaagcgaggtacagcctcatgcaaaaacagcataacgtcgtagcgggcgtggatatgggggcaacgcatatccgcttttgtctgcggacagcagaaggtgaaacgctacactgcgaaaaaaagcggaccgcagaagtcattgctcccggcctggtgtcgggtatcggcgaaatgattgacgagcaactcaggcgctttaacgctcgctgtcatggtctggtgatgggatttccggcgctggtcagtaaagataaacgcaccattatttctacgcctaacctgccgttaacagcggcggatttatatgatctcgccgataagctcgaaaatacgctgaattgtccggttgagttttcccgcgacgttaacctgcaactctcctgggacgtagtagaaaaccgccttacgcaacaactggttctggcggcctatctcggtacggggatggggttcgcagtgtggatgaacggtgcgccgtggacgggtgcacacggtgtggcaggcgaactgggtcatatccccctgggagatatgacccaacactgcgcgtgtggcaatcctgggtgcctggaaaccaattgctctggaatggcgctaagacgctggtacgaacaacagccccgaaattacccattgcgcgatcttttcgtccatgcggaaaacgcccctttcgtccagagtctgcttgaaaacgcggcacgggccattgccaccagcattaatctgttcgatcccgatgcggtgatcctgggcggtggcgtgatggatatgcccgccttcccacgcgagactctcgttgccatgacccaaaagtacctgcgccgtccactgccgcatcaggtcgtgcgctttattgccgcctcatcttctgactttaatggcgctcagggtgcagcaatattggcgcatcaacgttttttgccacagttctgtgctaaagccccatgagtaaaacgttggcacagtagcgcaatgtcccgctgtgccaacgacaggtacaatatatataataaacacataaaacgactcatattattttctgcaatgatagttttactgtaattttccctcttcagcacaaatgcctaataaaatggcgcgttccgctcacacttccacttattaaagtcgcaatttcccaattatgataacgccagctttaaatgacgtattttgcatggattacatatttacgacataaatgataaatggagatttatatgaataactctcggttattccgtttgagcaggattgttattgcgttaactgccgccagcggcatgatggtaaataccgctaacgcgaaagaggaagcgaaagccgccactcaatatacccaacaggttaatcagaattacgccaaatcattaccgtttagcgatcgtcaggattttgacgatgcccagcgtggatttatcgccccgctgctggatgaaggtattctgcgtgatgcgaacggtaaagtttactaccgcgcggacgattacaaatttgatattaatgccgcagcgccggaaaccgtaaaccccagcctgtggcgtcagtcgcaaatcaacggtatttctggcctgttcaaagtcaccgataaaatgtatcaggtgcgcggccaggatatctctaacattacgttcgttgagggcgagaaaggcattattgttatcgacccgctggtgacgccgcctgccgcaaaagccgcacttgacctttacttccagcatcgtccgcaaaaaccgattgttgccgttatctacactcacagccacaccgaccactatggtggcgtgaaaggcattatctctgaagccgatgttaaatccggcaaagttcaggtgattgcccctgcaggctttatggacgaagccatcagcgaaaacgtgctggcgggtaacatcatgagccgccgtgcgctctactcttacggtctgttactgccgcacaacgcgcaaggcaacgtgggtaatggccttggcgtgacgctggcaacgggcgacccgagcattattgcaccgactaaaactatcgtccgaactggcgagaagatgattatcgacggcctggagtttgacttcctgatgaccccaggtagcgaagcgccagccgaaatgcacttctatattccggccctgaaagccctgtgtaccgccgagaacgccacgcataccctgcacaacttctacactctacgcggcgcgaaaacccgcgacaccagcaagtggaccgagtatctgaacgaaacgctggatatgtggggtaacgacgcggaagtcctgtttatgccgcacacctggccggtctggggcaataagcatatcaatgattatattggtaaatatcgcgatactatcaagtacattcacgaccagaccctgcacctggcgaaccagggctacaccatgaatgaaatcggcgacatgattaagctgccgcctgcacttgccaataactgggccagccgtggctattacggttctgtcagccacaacgcccgcgcggtgtataacttctatcttggctattacgacggtaacccggctaacctgcatccgtatggtcaggtggagatgggtaaacgttacgtgcaggcgctgggcggttctgcccgtgtcatcaacctggcgcaagaagcgaacaagcaaggtgattaccgctggtcggcagaactgctgaaacaggtgattgccgccaacccgggtgaccaggtcgcgaagaatctgcaagcgaataactttgaacagctgggctatcaggccgagtccgccacctggcgcggtttctacctgaccggcgcgaaagagctgcgcgaaggggtgcataagttcagccacggcaccaccggttccccggacaccattcgcgggatgtcggtcgaaatgctgttcgactttatgtccgttcgcctcgatagcgcgaaagccgcgggtaaaaatatcagcctgaacttcaatatgggcaacggcgataacctcaacctgacgctgaacgatagtgtgcttaactaccggaaaacgctgcaaccgcaagccaacgcctctttctacatcagccgtgaagatctgcacgccgtgctgaccggacaggcaaaaatggcggatctggtaaaagcgaagaaagccaaaattattggcaatggcgcgaaactggaagaaattattgcctgtctggataatttcgatttgtgggtgaatatcgtaaccccaaattaatgccactcgcttttgggggcgctgaagcccccaaaagcatttattttaaaaatatatacaaccaattaatacataaaatatataagttatgaatgcggtggctgaataaagctatttttattcatcaagaaaatagccatactgacgccttcaatggatattgatattcactacagatattgttcgcagcagacaggatgtatttaatatgccaacagttctctctcgcatggcgatgcaactcaaaaaaacagcctggataattcccgtcttcatggtttcgggatgctcattatctccggcaatcccggtgatcggcgcttattatcccagctggtttttctgcgccattgccagccttattttgacgctcatcacgaggcgagttattcagcgggcaaatatcaatctggcatttgtcggaattatttataccgccctttttgctctctacgccatgctgttctggctggcatttttctaatctatttgagacgcgctcatggaaagtacgccgaaaaaagctcctcgcagtaaattccctgctctgttagtggttgcgttggcgctggttgcccttgttttcgttatctggcgcgtagacagtgcgccatcaactaatgacgcttacgcgtcagcagataccattgatgtggtaccggaagtcagcggccgcattgtagaactggcggtcaccgacaaccaggcagtcaaacagggcgatttgctgttccgcatcgacccgcgcccgtacgaagccaatctggcgaaagctgaagcctccctcgcggcgctggataagcaaattatgctcacccagcgtagcgttgacgcgcaacagtttggtgccgactcggttaatgccacggtagaaaaagcccgtgccgccgcgaaacaggccacagatacattacgccgcaccgagccattactgaaagaaggttttgtctcagcggaagatgttgaccgtgcaagaacggcgcagcgcgccgcagaagcggatcttaatgccgtattgttacaggcgcagtcagccgccagcgccgtcagcggcgtggatgcattagttgcccagcgtgcggcggtcgaagcggatattgccctgaccaaactgcatctggaaatggcgaccgttcgcgcgccgtttgatggccgggtcatttccctcaaaacctccgtcgggcaatttgcttctgccatgcgccctatttttaccctaatcgacactcgtcactggtatgtgatcgccaacttccgcgaaaccgatctgaaaaatattcgctcaggtacacccgcaacgattcgcctgatgagtgacagcggcaaaaccttcgagggtaaagtggattcgattggctacggcgtgctaccggatgacggcggcctggtgctgggcggcctgccgaaagtgtctcgttctattaactgggtccgcgttgcccagcgttttccggtcaaaatcatggtcgataaacctgacccggaaatgttccgcatcggcgcttcggcagtcgctaatcttgagccgcaataatgagcgcgctcaactccctgccattaccggtggtcaggctgctggcgttctttcatgaagagttaagcgagcggcgaccaggtcgcgtgccgcagaccgtgcaactctgggtaggctgcctgctggtgattctgatctcgatgacctttgagatcccttttgtggcgttatcgctggcagtgctgttttacggtattcagtcgaacgcgttttacaccaaatttgtcgcgatcttgtttgtggttgccacggtgctggagatcggcagcctgtttttgatctacaaatggtcatacggcgaaccgttgatccgattgatcatcgccggaccgatcctgatgggctgcatgtttttgatgcgcacccatcgcttggggctggtctttttcgccgtcgccattgtcgctatttacgggcaaaccttccccgccatgctcgactatccggaagtggtcgtgcgcttaacgctgtggtgtatcgttgttggcctctatccaaccttgctgatgacgttaatcggcgtgctgtggtttcccagtcgtgccatttcgcaaatgcatcaggcgcttaatgatcggcttgatgatgccattagtcacctgacagacagcctcgcaccgctacccgaaacgcggattgaaagagaggcgctggcgctacaaaaactcaatgtcttttgcctcgcggacgatgccaactggcgaactcaaaacgcatggtggcaaagctgcgtggcaacggtaacctacatttactcgacgctgaatcgctacgatcccacctcttttgctgattctcaggcaattattgaattccgacaaaaattagcttcagaaatcaacaagctgcagcatgccgttgctgaaggtcagtgctggcaaagcgactggcggatcagtgaaagtgaagcgatggcggcacgggaatgtaacctggagaatatctgccagacgttgttacaactgggtcagatggacccgaatacgccgccaacgcccgcagccaaaccgccatcaatggccgccgatgcttttaccaatccagactatatgcgctacgcggtaaaaacgctgctcgcctgtttgatctgttacaccttttacagcggcgtggactgggaaggcattcacacctgtatgctgacatgcgtgatcgtcgctaacccaaatgtcggttcgtcgtaccagaagatggtgctgcgttttggcggggccttttgcggcgcgattctggcgctgttattcacgctactggtcatgccctggctggacaatattgtcgaattgctgtttgtgctggcaccgattttcctgttgggcgcatggattgccaccagctctgaacgctcttcttatatcggcacacagatggtggtcaccttcgcgctcgccacgctcgaaaacgtttttggcccagtgtacgacctggtggaaattcgcgatcgcgccctgggtatcatcattggtaccgtggtgtccgcggtgatttacacctttgtctggcctgaaagtgaagcgcgcacactgccgcaaaaactggctggcacgctgggtatgttaagtaaagtaatgcggatcccacgccagcaggaagtcacggctctgcgcacttatctgcaaattcgtatcggtctgcatgcggcgtttaatgcctgtgaagagatgtgccaacgcgtggcgctggagcgtcaactggacagcgaagaacgcgcattactgattgaacgttcgcaaacggttattcgtcagggccgcgatcttcttcacgcctgggatgccacctggaactcggcgcaggcgctggataacgcactacagccggacagagcaggtcagtttgccgacgccctggagaaatacgctgccggtctggcaaccgcactcagccgttctcctcaaataacgcttgaagagacacccgcctctcaggccatcctgcccaccttattaaaacaggagcaacacgtctgccagcttttcgcccgcttgccagactggacagccccggcattaacgcccgccacggaacaggcacaaggagccacgcaatgatcaatcgtcaactttcacgtctgctgttgtgcagcattctcggcagcacgacgctgatttccggctgtgccctggtacgtaaggattctgcacctcatcaacagctcaaaccggaacaaatcaaactggccgacgatattcatcttgccagctccggctggccgcaggcgcagtggtggaaacaactcaatgacccgcagctggatgcgctgatccaacggacgctaagtggttcacacaccctcgccgaagcgaaactgcgggaagaaaaagcgcagtcccaggccgatttgttagatgccggttcacaattacaggtcgcagcgttagggatgctcaaccgccaacgtgtctcggcgaacggctttttaagcccttattcaatggatgcgccagcactgggtatggacgggccgtactatacggaagccacagtaggtttgtttgccggactggatcttgatttgtggggtgtgcatcgctcagcggttgccgccgccattggcgcgcataatgccgcgctggcagaaaccgcagcagtagagctatcgctggccacgggcgtagcgcagctttattacagtatgcaggccagctatcagatgctcgatctgttagaacaaactcacgatgtgattgattacgcggtgaaagcgcaccagagtaaagtggcgcacggtctggaagcgcaagtgcctttccacggcgcgcgggcacagattctggcggtcgataaacaaattgttgccgtcaaagggcaaatcaccgaaacgcgagaatctctgcgtgcattgattggcgcgggagccagcgatatgccggagatcagaccggtggcattaccgcaagtccagaccggcattccggcgacactctcttatgagttgctcgccagacgcccggatctgcaagccatgcgctggtatgttcaggcgtcattagatcaggtggattccgcgcgggcgttgttctatccgagctttgatatcaaagcgtttttcggtctggactccatccatctgcataccttattcaaaaaaaccagtcgccagttcaacttcatcccgggtctgaaattgccgctgtttgacggtggacggttgaatgccaatctcgaaggcacgcgcgccgccagcaacatgatgattgaacgttacaaccagtcagtactgaacgcggtgcgtgacgttgccgtcaacggcacgcgtctgcaaacgctcaacgacgagcgagaaatgcaggctgaacgcgtggaagccacgcgctttacccagcgcgctgccgaggccgcctatcagcgcggcttaaccagccgcttacaggccaccgaagcccggttgccagtgcttgccgaagagatgtcattactgatgctggacagccgccgggtgatccaaagcattcagttgatgaaatcgctgggcggcgggtatcaggcaggtcccgtcgtcgagaaaaaataaaatgtctgccgcgtgatggctgtcacgcggtatttcgtttcgtcacgtcaaaactgacgacagcctgtttttcgtcagagttttgaataaatagtgcccgtaatctcagggaatgaccccacataaaatgtggcataaaagatgcatactgtagtcgagagcgcgtatgcgtgatttgattaactggagcgagaccgatgaaaaaagtcgtcacggtttgcccctattgcgcatcaggttgcaaaatcaacctggtcgtcgataacggcaaaatcgtccgggcggaggcagcgcaggggaaaaccaaccagggtaccctgtgtctgaagggttattatggctgggacttcattaacgatacccagatcctgaccccgcgcctgaaaacccccatgatccgtcgccagcgtggcggcaaactcgaacctgtttcctgggatgaggcactgaattacgttgccgagcgcctgagcgccatcaaagagaagtacggtccggatgccatccagacgaccggctcctcgcgtggtacgggtaacgaaaccaactatgtaatgcaaaaatttgcgcgcgccgttattggtaccaataacgttgactgctgcgctcgtgtctgacacggcccatcggttgcaggtctgcaccaatcggtcggtaatggcgcaatgagcaatgctattaacgaaattgataataccgatttagtgttcgttttcgggtacaacccggcggattcccacccaatcgtagcgaatcacgtaattaacgctaaacgtaacggggcgaaaattatcgtctgcgatccgcgcaaaattgaaaccgcgcgcattgctgacatgcacattgcactgaaaaacggctcgaacatcgcgctgttgaatgcgatgggccatgtcattattgaagaaaatttgtacgacaaagcattcgtcgcttcccgtacagaaggctttgaagagtatcgtaaaatcgttgaaggctacacgccggagtcggttgaagatatcaccggcgtcagcgccagtgagattcgtcaggcggcacggatgtatgcccaggcgaaaagcgccgccatcctgtggggcatgggtgtaacccagttctaccagggcgtggaaaccgtgcgttctctgaccagcctcgcgatgctgaccggtaacctcggtaagccacatgcgggtgttaacccggttcgtggtcagaacaacgtacagggtgcctgcgatatgggcgcgctgccggatacgtatccgggataccagtacgtgaaagatccggctaaccgcgagaaattcgccaaagcctggggcgtggaaagcctgccagcgcataccggctatcgcatcagcgagctaccgcaccgcgcagcgcatggcgaagtgcgtgccgcgtacattatgggcgaagatccgctgcaaactgacgcggagctgtcggcagtacgtaaagcctttgaagatctggaactggttatcgttcaggacatctttatgaccaaaaccgcgtcggcggcggatgttattttaccatcaacgtcgtggggcgagcatgaaggcgtgtttactgcggctgaccgtggcttccagcgtttcttcaaggcggttgaaccgaaatgggatctgaaaacggactggcaaatcatcagtgaaatcgccacccgtatgggttatccgatgcactacaacaacacccaggagatctgggatgagttgcgtcatctgtgcccggatttctacggtgcgacttacgagaaaatgggcgaactgggcttcattcagtggccttgccgcgatacttcagatgccgatcaggggacttcttatctgtttaaagagaagtttgataccccgaacggtctggcgcagttcttcacctgcgactgggtagcgccaatcgacaaactcaccgacgagtacccgatggtactgtcaacggtgcgtgaagttggtcactactcttgccgttcgatgaccggtaactgtgcggcactggcggcgctggctgatgaacctggctacgcacaaatcaataccgaagacgccaaacgtctgggtattgaagatgaggcattggtttgggtgcactcgcgtaaaggcaaaattatcacccgtgcgcaggtcagcgatcgtccgaacaaaggggcgatttacatgacctaccagtggtggattggtgcctgtaacgagctggttaccgaaaacttaagcccgattacgaaaacgccggaatacaaatactgcgccgtgcgcgtcgagccgatcgccgatcagcgcgccgccgagcagtacgtgattgacgagtacaacaagttgaaaactcgcctgcgcgaagcggcactggcgtaataccgtcctttctacagcctcctttcagaggctgtttttttatccattcgaactctttatactggttactccctacccaatcgtattatcaaaatgaaaaaaattatcgcattgatgttgtttttgacattctttgcccacgccaacgactccgagcctggcagccagtatttaaaggcagcagaggccggggaccgacgcgcacaatattttcttgccgacagctggtttagctccggcgatttgagcaaagccgaatattgggcacagaaagccgccgacagcggtgatgctgatgcctgcgcgctgctggcgcagatcaaaatcaccaatccggtcagtctggactatccacaagcaaaagttcttgcagagaaagcggcgcaagcgggcagtaaagaaggtgaagtaacgctggcgcatattctggtaaatactcaagcgggtaaaccggattatccaaaggcaatttcgctgttagaaaacgcctcggaagatctggagaacgactctgccgtcgatgcccaaatgctgcttggtttgatttacgccaacggcgtgggcattaaggccgacgatgacaaggcaacctggtatttcaaacgcagctctgcaatttcccgaaccggttattccgagtactgggcgggaatgatgttcttaaacggtgaagaaggttttatcgagaagaacaagcaaaaggcgctgcactggttgaacctgagctgtatggaagggtttgataccgggtgtgaagagtttgaaaaattaaccaacggttaagataggcctgataagacgcggcaagcgtcgcatcaggcattgatgtcggatgcggcgtaaacgccttatccgacctacaaaatcacgctaaatcaggctattgcgctgtctggcgtaggcctgataagacgcgttaagcgtcgcatcaggcgttgatgtcggatgcggcataaacgccttatccgacctacaaaatcacgctaaatcaggctattgcgctgtctggcgtaggcctgataagacgcggcaagcgtcgcatcaggcgttgatgtcggatgcggcataaacgccttatccgacctacaaaatcacgctaaatcaggctattgcgctgtctggcgtaggcctgataagacgcgttaagcgtcgcatcaggcgttgatgtcggatgcggcgtaaacgccttatccgacctacaaaatcacgctaaatcaggctattgcgctgtctggcgtaggcctgataagacgcgttaagcgtcgcatcaggcgttgatgtcggatgcggcataaacgccttatccgacctacaaaatcacgctaaatcaggctattgcgctgtctggcgtaggcctgataagacgcaccagcgtcgcatcaggcatccacacattgccgggtggatatccccggcaatcttcaattattgatccgcagttttatcaaatttacccagcacttcacgctcataagccagcgcctttttgcggtcaaatttgtgttcccacttggcaatcaccagcaccgccagcgcattacccacaacgttcagcgcagtacgcgccatgtcgaggatacggtcaacaccggcaataaacgccagaccttccagcggaatacctacgctacccagcgttgccagcaacaccacaaacgacacgcccggcacgccagcaatccctttcgaggtcaccatcagcgtcagcaccagaatgatttcctgccagatggacaggtcaatgccatacagctgagcgatgaaaatagcggcaatactttgatacagcgtcgaaccatcaaggttaaaagagtaaccggtcggcaccacaaagctggtgatcgacgccggtgctccgtaggcttccatcttctcaataattcgcggcagtacgctttcagagctggcagtggagtacgccagaatcagctcatctttcagaatacgaatcaggatccagacgcttaacccgcacaggcgcgccacaattcccagcactaccagcgcgaagaacagaatggcgaaatgcaccagcaacaccagtttcgccagtggccacagagaagagaaaccaaagttagccaccgtcaccgcaatcagcgcaaacacacccaccggtgcataacgcatcaccatgtgagtcactttaaacatggtttcagagatggagcggaacacggtcaccagcggttcacgatgcgtcgcgggcagggaggaaagccccagaccaaacagcaccgagaagaagatgatcggcagcatttcgcctttcgccatcgacgccacaatgttcgtcggcaccagcgacaaaatcgtgcccataatgccgtgggaactgctttgtaccgcttccgtagtgctctgatatttcgagatatcgacggtcgccagctgcgacatatccaccccggcaccgggctggaagacgttcgccagagtgatccccaaaatgatggcgacggtggtgatcacctcgaagtaaataatggttttcgcgccaatacgcccgagctgtttggcatcaccaacacccgcgatacccaccaccagcgtggagatcacaatcggcacaacaatcattttgatcagatggatgaagatatcacccgccggagagagcaaattgacgaccagccagtcgcggctgtcgctatggtagtgcaggtagcttcccaggagaatgcccagcaccatagcaaacagaatctgccaggccaggctgaattttatacttttcatcagaataacttcctcaatggagcgccgttccccgttcagaaacgcgagaacgtgacatactgccagggcatgaattgtgttgcgttggtttgtagatttttttaacgcttatgatcagtatcatttgcgcggtatgttgcgcaaccctttaacaacagagcttttcgctgcattaatgcataataacgcgagtttatggcaggattaatgaataaccatttgttatggaaagatttttatttgtttaatctgcaataatactgattggtgattatttttggcatatgttcattcgattattttttatacaactcaataacataatcttcatcaccagatgattaatctgatctccgctgcaacaatttcgccatattaatcgactcgaccagctgtgtccggttgatccggggtgagttgagatccatcactttttgccatagttcgatggcttgcgcgtaattcgcctgcataaacgcatcggaagccagcagcatcagagcggtgatttcgttagagtccagcgcgagggctttatcgatcattgcgcgagtctgggcggtcatatgctggctggcctggtaataaagcaccgtcgccagcgccgcatacagttcagcgttctcaccacgtagttgcaacgcctgacggtacgccagcagcgaattgctgtaatcgttttgccacagatagtactcgcccagtaacgcccattgttcgctgttttgtggattagcgcggattttatcctgcaatgcctgaagctgcgcttccggggtttgctggctggcaaactgatgtagcggatcgcgctgacgctgatactccgcacgtaccgcctgccattttgggcttaacagataactgccgacacagagaaataccatcaatatcgtgagtgttgtcagcattttcaccggtattttgggctgtttcatcgcttcgccctcactcgccagaggatcagtgccatcagcagtaacaacaccactggcagcgcccataacaccagcgtctgacccgttaacggtgggttatagcgaacaaaatctccgtagcgttcggtcatccagccaatgatttcgacttcgttcttcccctccgccaccatgctgtaaacctgatggcgcatactgactgccaccggcgcgttggattccagtaagttttgattctggcactgcggacaacgtaactggctggcaatatttaacgcctgttgctgttgttgcggattggcgaattgccaggtgtctacaacctgagcgcgcgcaaaacaggtaaatagcagcagcaaaatgagaagccctttattcatcgcgcttcctcccccgccatccgcttaacaatgcgcccgcaatcatcaacaatcctcccccccagatccagcgcacaccgctttgtacatacaaacgaaaagcgtaacgatccgctccggttttttcacccatgaccgcataccagtcatggatgccgttccagcaaattgacggttccatcatttgctgacgacgtgcttcataaaaacgccgctccggcgttaattcaccaatgcgttgctgatggtcaaacagtgccactatcgctttttcgctggtgtaattgcctctggcttgcagatcgagtcgctcaaaacggaaggtgtatcctgccagcgtcacctgctgacccggctgtaaattcaggctgatctcctgacgactgacgctggaaaccacgatccccgcggcaaataacagcacgccagcatgagctaccagcgccggaagctgcacgcgtttgccagagacaaacgtcgccagcacaatcaccaccagcatcaacagaccaaacggtaacgtcgcgcggttaaaatacggcgcgccaacggagaggcgtccccagcccagcagaccgtaaatcatcggataaagcgttcccaccagcacgatcagtagcactgcgcaaaacagcaacagcgtagcgaggattaacatttcccgcgataacaccgaaaaacgcaccgccgggccaccgtcccgcgctcgccagccatacagagccagagacgcaaggctaatcagtgcaaacaggctgaacaacggcacggcgcggacgttatccagcgcgaacgcatgaaccgaaaccagaatgccagaacggacaattaaggtgcccagcaatgacagcatcagagtaactatcgccagcaacagcgaccagtggcggaaaatcccccgctggcgtgtcagggataaactgtgcagcagcgcagtggcagaaagccagggtaataaagaggcgttttccaccggatcccagaaccaccagccgccccagcccagttcgcaataggcccaccaggaaccgaggatgatccccgccgttaatgcactccagccaggtagtgcccagcgccagcaaattctggcgcaggcaccatcaaactcgccgcgcagtaaactcgccagcgccacgctcgccgctaccatcaaaccgccatagccaaggtaaagcagcggtggatgaaagataagaccgggatgttgcagcatcggattgagatcgcggccttcgattgctggtggaaatatccgcacgaagggatcggaccacagcaccacaaacagtagcagtgcggcgagcatgagagataaaacggctaacgtcagcggaaatagcggatcggtttgctgccgataatgccaggcaaacagcgcgctccaggcggaaagcagcagcccccaaagcagcagcgaaccttcatggccgccccacaccgctgccagcttgagttcccacgacagcaggctatagctatgttgcgcgacataaatgaccgagaaatcgctgatgagaaaacaatacgtcagtacgccaaaggcgagcagcaggagcgcgaactgcgccagaatgccgatgcaagtgagtcgcatcatggcaggccagcgcaaccgcactcccgcaaaggccgtcaacggggtcaacacgttgaccccgagacttaacaacaacgccagaaaaccgacttcaggaaggaatacgtccagaaaccacctctgttctggcttacgccaccgttaactgcccggcgtagagaatgaaaaagcgcagcatcaacacgccgaccagactggctccacacgccgccagcacagcaggaatgccggaactgcgattgacccacggtttgagcaacattggcacaatcagccccagcccggcgacaccaagccagaaccaccacgtccagaaaccgccacccaatgccgccaccagcgcacgcactttaccgtcatcgcccagcgccagaccgacaaaaaacgccaccagcaggaagatttcaccccataccacagggatttccatacggtgaataaagtgcgcttccgtggaatatggatttttgcgttggcgtatcgccatggcgatcagcgccaccgccgcaccggacgagatgccggagaagaggaacagcaccggcaggatcgggttattgaggaacggatacgatttcagcgccgacagcagaaagccggtataagcccccaacaacaccgccaacaccagcatcaatgtttccagtccgcgatgaacgggcgtcagcaggctcagaaccttttgcacgatccccagcttcggcaaccagcgttgttgcagggcaagcaaatcatgttcaaagattttcgccagccacagcaccagcaccaccatgtagagctgaaacagcatcacccccatcgacatcaccgaggtaaaactgtagtggaacatcagcttccagaaggtccacggtcttgtcaggtggaagacgaggatcaacagaccgaggatcaccgcgcccggcccgacaatcagcgtggtgcgcagcaacgtactgtctgcaccgcccgcctgcgggtagaagcgacgtaacagcacggccagcgtcaccagaccggcagaaataccaatcaaaaacaggtagatggcaatcggccagtcccacaccagcgattcaaaatgaaatgcggaagtctgcgtcattggctcacctccccgtatttaaacggtacgcggtacagcttcggtttggttcccagcgccagcttgtagcggtaagtaggcttctggcgcagcagttgcgaaatctcactgttaggatcgtccagattgccaaacgtcagcgccttcgtcgggcaagcctcaacgcacgcgggcagcttaccggcctgcaaattggttttacggcagaaatcgcatttgtccgccgtcttcgtgaccggatggataaagcgcacgcggtacggacaggcggcgatgcagtactgacaaccgacgcagagatcaggattaacatcgacaatcccgctagcggcatcacgaaaagacgcaccggtcgggcagacgtcaacgcacggcgcatgatcgcagtgctggcaagacttacggaagaagcgatatttcacatcaggaaattcgccctgcggctcgctacgaataattgtcaggcgcgagacgccttccggcaccttgttcacttcccgacaagcatccatacaggcggtacagccgatgcataacgactcgtcatgcaccatgccgtaacgcaccccattgatattcaacgttttcgccaccacgcgtcctgcggtgccgctgacggctgcaagcacgccgacgccggtgagaaactggcgacgagaccaggtcatggctgctccttaagcaacggaacagacgccgggttaaagttcggattggtgcgctgatcgctgtggcaatcgacgcaaatcttaatccgtcctttgtcacttaacgtctgcatcgtatcttgctgtggatgcagggaatggcagctggcgcacgccactttggttacgtggacatcgtgcggccagaacgctttttgcaactgttccggcagatgacaggacatacagacgctgttctgctctccaaccttgtacatcggctcgttaaagcgcatcacatctttcaccccttcgcggtgttgcggtgatggctggccgtgacagttggtgcaggtgaccggcagtttgttattcgggttgataacggaagcatgtttgccatgcataccttcggtatctggcttatgacagtccagacaggcggcatccgggttacgctgctgggtaacttcgtagcgatcaccagatgcctgcgccgcaggggtagcggtaattccgttcaggctccacaacaggcccgacgccagcaccccagcagttaataacgaacgtaatacgctcatattcactccattgtgttttccgccccttgcgaggcggaacggggttattggcttaacagaccatttttacgtgcctgttcttcccactgcgggatcaccgttttgatgaagtcctgcttctcggccttgatttgttccatgttcaggccaatggcctgctgggctttctctttggtcgagatatccgggatctggatttcatgggtgatgcctttggtcgccagcaggcgcgccagtttggtgcgcgcatccgccgctttatccatcgccgtaccgagcatcctcagaccttcttccggtgcgtgcatatgaatgccgtgggaagcgatcgccagatcccaacgccactgggcatgacggatatcgtcctgaatcggcttcatttcggcttccgtcgcgcctgcatccagcgccgctttcgcttcgaagtgagcgtgaaccagttgatcttcaaccttgattttcaggtcgttaatcgactgcttacgttccgcgaccactttttgcaaggcagctttgtcctgggtatggcagttcgcacaagtctgggcgaagttatcaaacggattaccaattttatggtcggtgtagagtttgccttcggcgttctgcacttttggcatatggcagtcgatacaggtcacgttgtttttaccgtgaatgcccgctgtccaggtttcatattccgggtgctgcgctttcagcattggcgttttcgacagggagttagtccagtcagagaaggcaattttgtcgtaatactgctccatattttcgactttcatgccgtcatcccacgggaatttaaccgctttgtttttgccgtcgaagtaatactccacatggcactgaccgcaaaccatcgattgctggtcgaaacgtccggctttctcaaaaggtttaccaatggcttccatcgcgcgagccgcatacggacgggaaagggttaactccggtttgcctttggcgaactctggtgaggcggtgttatggcagtcggcacaacctaagttgttgacgatttccgggccgccgcgcgcccacttaccgtggaagtagccatcttcgccgtctttctggatcagacgcgccacatccgggcttttacaactccagcacgccatcggtagcggaccatcttcagcgtttttcggcgcaccggtacgcagggtttcacgcacatcggtcacagcaaaggcatgtccacgcggcttgttgtaatcgcgcgagaagggataccccgcccacaggatcaccagccgtggatcttccgccagggcgtcaacacgctctgactgttccgaggtggctttccaggagagatattgatcgggatgctgcggggcaaaggtttcattcttcgcttccacagttacaggttttgcgggagcagccgtttgttcagcgtgaacagaagtgaaaaagaaaaaaggaatcaataagctgaagatacggcgtgcgtttatttttatccttgtcataggggcttcatccgaattgcgccattgttgcaatggcggtttttattgtttttcacgacagtaaccgcacctacactgtcatgacattgctcgcccctatgtgtaacaaataaccacactgtgaatgttgtctttaatcaattgtaagtgcatgtaaaataccactttagagttagtcagtatcttcctctttttcaacagcatgcataactgcatgttcctcaaagaattaatcaacttttgttgctgaccttcaaaaattaccctgccgtttatttgcacaattctacttttgcgtgatctgtcgcccaaatactaaacaaaactgccaatacccctacatttaacgcttatgccacatattattaacatcctacaaggagaacaaaagcatgagccaaattcacaaacacaccattcctgccaacatcgcagaccgttgcctgataaaccctcagcagtacgaggcgatgtatcaacaatctattaacgtacctgataccttctggggcgaacagggaaaaattcttgactggatcaaaccttaccagaaggtgaaaaacacctcctttgcccccggtaatgtgtccattaaatggtacgaggacggcacgctgaatctggcggcaaactgccttgaccgccatctgcaagaaaacggcgatcgtaccgccatcatctgggaaggcgacgacgccagccagagcaaacatatcagctataaagagctgcaccgcgacgtctgccgcttcgccaataccctgctcgagctgggcattaaaaaaggtgatgtggtggcgatttatatgccgatggtgccggaagccgcggttgcgatgctggcctgcgcccgcattggcgcggtgcattcggtgattttcggcggcttctcgccggaagccgttgccgggcgcattattgattccaactcacgactggtgatcacttccgacgaaggtgtgcgtgccgggcgcagtattccgctgaagaaaaacgttgatgacgcgctgaaaaacccgaacgtcaccagcgtagagcatgtggtggtactgaagcgtactggcgggaaaattgactggcaggaagggcgcgacctgtggtggcacgacctggttgagcaagcgagcgatcagcaccaggcggaagagatgaacgccgaagatccgctgtttattctctacacctccggttctaccggtaagccaaaaggtgtgctgcatactaccggcggttatctggtgtacgcggcgctgacctttaaatatgtctttgattatcatccgggtgatatctactggtgcaccgccgatgtgggctgggtgaccggacacagttacttgctgtacggcccgctggcctgcggtgcgaccacgctgatgtttgaaggcgtaccgaactggccgacgcctgcccgtatggcgcaggtggtggacaagcatcaggtcaatattctctataccgcgcccacggcgattcgcgcgctgatggcggaaggggataaagcgattgaaggcaccgaccgatcgtcgctgcgcattctcggttccgtgggcgagccaatcaacccggaagcgtgggagtggtactggaaaaaaatcggcaacgagaaatgtccggtggtcgatacctggtggcagaccgaaactggcggtttcatgatcacgccgctgcctggcgctaccgagctgaaagccggttcggcaacacgtccgttcttcggcgtgcaaccggcgctggtcgataacgaaggtaacccgctggaaggcgctaccgaaggcagcctggtgatcaccgactcctggccgggtcaggcgcgtacgctgtttggcgatcacgaacgttttgaacagacctacttctccaccttcaaaaatatgtatttcagcggcgacggcgcgcgtcgcgatgaagatggctattactggataaccgggcgtgtggacgatgtgctgaacgtctccggtcaccgtctgggaacggcggagattgagtcggcgctggtggcgcatccgaagattgccgaagccgccgtagtaggtattccgcacaatattaaaggtcaggcgatctacgcctacgtcacgcttaatcacggggaggaaccgtcaccagaactgtacgcagaagtccgcaactgggtgcgtaaagagattggcccgctggcgacgccagacgtgctgcactggaccgactccctgcctaaaacccgctccggcaaaattatgcgccgtattctgcgcaaaattgcggcgggcgataccagcaacctgggcgatacctcgacgcttgccgatcctggcgtagtcgagaagctgcttgaagagaagcaggctatcgcgatgccatcgtaacccacaattgccggatgcgagtcggtaacggtttgtaggcctgataagacgcgacagcgtcgcatcaggcattgattgccggatgcggcgtataacgccttatccggcctacattcggcaagggttacccgagcgttaaccttctcccataagggagcgggaattaaaacaatccctacattacctctggagaatctgtgatgaatggtacgatttatcagcggatagaagacaatgcgcatttcagggagttagtcgaaaaacggcaacggtttgccaccatcctgtcgattattatgctggcagtttatatcggctttattttactgatcgccttcgcgcccggctggctgggcaccccgctgaatccgaacaccagcgtcacacgcggtattccgattggtgttggagtgattgtgatctcctttgttctcaccggtatctacatctggcgggcgaacggcgaattcgaccgtcttaataacgaagtcctgcatgaggtacaagcatcatgaaaagagttctgacggcgcttgccgccacactccctttcgcagctaacgccgcggatgctattagcggggccgtagagcgccagccaacgaactggcaggcgattattatgttcctgattttcgtcgtgtttacgctcggcattacttactgggcatcaaaacgcgtacgttctcgtagcgactactacacggcaggcggcaatatcacaggcttccagaacgggctggcgattgccggtgactatatgtccgccgcctcatttttggggatctccgcactggtgtttacctccggctatgacggcttaatttactcgctgggcttcctggtgggctggccgatcattttgttcctgattgccgaacgtctgcgtaacctgggacgctacacctttgccgatgtagcctcttaccgcctgaaacaagggccgattcgtattctttcggcctgtggttctctggtggtggtggcgctttaccttatcgctcagatggtaggcgcaggtaaactgatcgagctgctgtttggccttaactatcacattgcggtggtgctggtcggcgtgctgatgatgatgtatgtcctgttcggcggcatgctggcgaccacctgggtgcaaattattaaagccgtgctgttactgttcggtgccagctttatggcctttatggtgatgaaacacgttggctttagcttcaacaatctgttcagcgaagcgatggcggtacacccgaaaggggtcgacatcatgaagccgggcgggctggtgaaagatccgatctccgcgctctctctgggtctgggactgatgtttggtacggcgggcttgccgcacattctgatgcgcttctttacagtcagcgatgcccgcgaagcacgtaagagcgtgttctacgccaccgggtttatgggctacttctatattctgacctttattatcggcttcggcgcgatcatgctggttggtgcgaatccggaatataaagacgcggcgggccatctgattggtggtaacaacatggcggccgttcacctggcgaatgcagtgggcggcaacctgttcctcggttttatttcagcggttgctttcgccactatcctcgcggtggttgcgggtctgacgctggcgggcgcatccgcggtttcgcatgacttgtacgctaacgtcttcaaaaaaggcgcgaccgaacgtgaagagctgcgggtatcaaaaatcaccgtactgatcctcggcgtgattgcgattatcctcggcgtgctgtttgagaatcagaacatcgcctttatggtggggctggcgtttgccatcgcggcgagctgtaacttcccgatcattctgctttctatgtactggtcgaaactgaccacgcgtggcgcgatgatgggtggctggctggggctgattaccgcagtagtactgatgatcctcggcccgacgatttgggtacagatccttggtcacgaaaaagccatcttcccgtatgaatacccggcgctgttctctatcaccgtggcattcctcggcatctggttcttctcggcaaccgataactcagcggaaggggcgcgcgagcgtgaactgttccgcgcgcagtttatccgctcccagaccggctttggcgttgagcaaggccgcgcacattaatctctccccttccccggtcgcctgaccggggaatactcttcctctccagcatgcatcaccttttcccaaaatattaaacaaataaactcattaaaaaatgagcgatttttgacagtcgtagaaaatgataatgcagagaatatgccttttctttcttgttaattataaggatattttatgtgctacaatggtttaaataatatgtttttccctctttgccagattaacgataaccactctgtcacaagtccatcacatacaaagaaaacaaaatcagataattacagaaaacatcataaaagcacgttaattgacaataaagccctctctcttttcaagatggatgatcatgaaaaagtgataggcttgattcagaaaatgaaaagaatttatgatagtttaccatcaggaaaaatcacgaaggaaacggacaggaaaatacataaatattttatagatatagcttcacatgcaaataataaatgtgacgatagaattacgagaagagtttaccttaataaagataaggaagtgtcaattaaggtggtatattttataaataatgtcaccgtccataataatactatcgaaatcccacagacagtaaatggtggttacgatttttcacaccttagcctgaaaggtatcgtgattaaagatgaagatttatccaattcgaattttgcaggttgcagactacaaaacgctatttttcaggactgtaatatgtataaaacgaattttaatttcgccataatggaaaaaatactttttgataattgtattctcgatgactcaaatttcgctcagataaaaatgactgacggaactctaaattcatgttccgctatgcatgttcaattctacaatgcaacaatgaatagagccaatattaaaaataccttccttgattattcaaatttttatatggcatacatggctgaggtaaatctttataaagtaatagcgccatatattaatttatttagagccgaccttagcttctctaaacttgatttaattaactttgaacatgctgatctgtctcgtgtcaacctgaataaagcaaccctccagaatataaacttaattgatagcaaactcttttttacgcggttaacaaatacgttcctcgaaatggttatatgtaccggctctaatatggctaatgttaattttaataatgccaatttaagcaattgccatttcaactgttctgttttaacaaaagcctggatgtttaatatccgtctctatcgtgttaatttcgatgaggctagcgtccagggaatgggtattaccattctccgtggtgaggaaaatatctccattaatagtgatatcctggtaacactacagaaattctttgaagaagattgtgccactcatactggcatgtcacaaactgaggataatcttcatgcagtcgctatgaagattactgcagatattatgcaagatgcagattgaggttaagtcgaagaacagccaatgaattgactttaaaagagagataacttatttgttttagaatcatgaatgttagcccgagctaacctgttaaaggtgcaaaagattgcacctttttcagattacctcgggcctggttacgtcgctttcggcttactgattttcctcaattagcaacgcttcaagcaaatcgagatcgtgcagtaatttttgcagcgtttcgttgctgatctcccgtgtggcgcgcaggtggtaaagttcagcacgttcagaacgcaatgccgccagacggaagcgacgctcaaggttctcttcctgcacggaactttcaacgtcgttacgtccatcggcgcgacgacgcaggttaccaatgacgcgagaactgacctccgtaagcagctggttatcgatattctcttcggtatccgccgccagacgctcctccattttctggatcgccacaatcgccacttctgccgttgccgctcgcgcaatacgttcctctttcaattgttgcgaatgatccgcgacttcaatgtgttgtagcagaataggcaacatcaccacgccgacaaacagcgagaagagaatgacgccagccgccaggaacaccagctcatagcgcgccgggaagacgttaccatccggcaagagcagcgggatagagagcacaccggccagagtgatcgccccacgcaccccggcgaaagacgcgatcaggatttctcgtgtggtccacgaaccaaactccatcggcttcttcttcaggaagcggttgctgaactttttcatcgtccacagccagccgaaacggaccagcatcagcgccgcatatatcagaataatatcggtaaacagcatccagatttcgacgttagggtcgatttctgctgccatcagcgacgtctccagaatacccggcagctgcagacctaacagcaggaacaccatgccgttaaagacaaattccagcatcgcccaggtgctgtttgcacgcaggcgcattgccagcggcgcacggcgcatcacaccggagcgggtgatggtcatcccggcggcaaccgcagcgaggatgccggaaacgccaatatgttcggcaatcagataagaagcgaatggcagcaggaacagcaggacgatctgcgtcgcgggttcatcaccgccccagcggctgaggaatcgcagcgagcgaccgtacagccagctcaccacaaaaccggcgagaataccgccaatggctactttcataaattcgaccgtcgcaccgccaacggtgaagatcatcgtccccatcgccactgccacggcaaacttcaacgacaccaggccggaggcgtcattcatcaacgcttcgccctgcaaaatgcccatgatttttttcgggatgcgcccttcgccaacaatcccggagagcgccacagcatcggtcggagaaagcaccgccgccagcgcaaaggcggggatcagcggaatgcccggcaccacccagtaaataaggaagccaatgccgaccacggtgaccaccaccagcgccagtgcgaggccgaaaatctctcgaccatgttcaagaaattcacgggtcggcgttttccagccatcagcgaacagcaacggcgggataaacaagactaaaaagagttcaggatcaaactccacatgcaaaccaaacgtcggccacgccagtagcgcaccgatggcgatttgcataagcggaagcgggatctgaaagggcatgacacgagtgaccaccccggacagcgagaccacgagggtcattatcagtatggtgaagaagatttccatgcgttccctgtttgcgatgtttttttatgacctgagaaaagcgttatgcctgaattctcattttttcagaatatcgcaaaagctcacacaatgtgcggagaaaataaaaacgggcagccattgccacccgttttcagaatccgatgaaagattagatagcccagccacccgcatagaaggtcaccagcgccacggcgataacgaccgtaccgatgttcaacttgcgccattcgccggaaaccagacgcccaatcaccagagtcgcgaagccgatcatgatgcctgttacgatgttacaggtcagcacgatgaataccgccgtaaccagacccgccatcgcatcaacaaaatcagcaaagtcgattttcgccacgttgctcagcatcagcaggccaacgtacatcagcgccggagccgttgcataccccggaacgaggtaagagagcggagagaggaacagaatcagcaggaacagcacgccaacggtgatagccgtcaaaccggttttaccgcccgccgccgtacccgccgcagactcgatgtataccgctgccggagctgcacccaccaggccagagaaaacgctgctcatggagtcagtggtcagtgctttcccaccgtcgataatttgcccatctttatccagcaggttcgcctggccggcgacggcacggatagttccggtggcatcaaatactgccgtcattaccagcgccagaacgcttggcaggactacaggattcagcgcgcccataatgtccaggctgccaatcagtgagttgccgttttcatcgctcaatgaaggcatggcgaaaacgccggagaaatggacgttaggatcgaagatcaaaccgacaattgagataccgataatggtcagcagaatgccaccagggactttcagtttttccaggccgatgatcaccgccagacctaccagtgacataatcaccgggaaggtcgcgaaatcacccagcgcaacgggcagaccatcaagcgggtttttaatcaccagaccgacaccgttagcggcaatgagcagcaggaacagaccgataccaatccccgtgccgtgcgccacaccgtgcggcaagttgcgcaaaatccagctacggatacccgtggcagaaattaccgtaaacagcacacccatcaggaacacggcacccagcgcgacaggtacgctaatatgttgccccagcaccaggctgaatgcggtaaatgccgtcagggagatggcgcaaccaatcgccaacggcagattagcccacagacccatcacgatagaaccgagtccggcaaccagacaggttgcaacgaaaactgccgcaggcgggaagcctgctttacccaacatacctggaacgacgatgaccgagtagaccatcgccagaaacgttgttaacccggcaaccacttcctgacggacagtgcttccacgttgtgaaattttaaaccaggcgtcgagtgaaccgccggtacgcgctgatggcgtagacataagaaaacatcccctgagagtttaattttcgtcaagatgcgtggcggacaatcccctgccagcgaaacgttatcttcctgctccaggtttgcgacaatttgctgcgtcgcaaaaaagcaaacgtttagctccgcgcatacaaaacgggtggtaaaaaaagcaaacgattatccggcgatcatagcggctttttcaaccgaagtttgctgcttttttctcttttattgtcttgacgatgaaaaaccaggcaattgatgcgcaaacgttatcgtcggtgcgcaagattgcagcgttatcgagccgtataccgttcaggattgcgataaaaaatcgtctgagatgacaaaaatattgcggttaaaaagtatacttttacactggcgaagaaacgtcggtgacatacaattaaagcatcaacaccaaccggaacctccaccacgtgctcgaatgaggtgtgttgacgtcgggggaaaccctcctgtgtaccagcgggatagagagaaagacaaagaccggaaaacaaactaaagcgcccttgtggcgctttagttttgttcatcttccagcaagcgtgcgccggtaccttcttctcctaagcggtcgcccgggttacgcaacgggcaatcactgcgcgaaaggcagccacaaccaatacatccgtccagttcgtcacgcagcgccactaaggtatgaatgcgccgatccaactcttctcgccattgggacgaaagctgtttccactctttcgcacttaacgtatgcccttcgggcaacacgccaaacgcttcaccaatggtcgccagcggaatgccaatacgctgagcaattttgataattgcaacatatcgcaacacatcacgtttatatcgccgctgattgccgctgttacggatactggtaatcaaccctttactttcatagaaatgcagcgccgataccgccacaccgctgcgtttcgccacttcgccgggggttagcagcgctttaatgcggggtaatttcttttccataaatcgctttacctcaagttaacttgaggaattatactccccaacagatgaattaacgaactgaacactgaaaagaggcagatttatgtcccatcagaaaattattcaggatcttatcgcatggattgacgagcatattgaccagccgcttaacattgatgtagtcgcaaaaaaatcaggctattcaaagtggtacttgcaacgaatgttccgcacggtgacgcatcagacgcttggcgattacattcgccaacgccgcctgttactggccgccgttgagttgcgcaccaccgagcgtccgatttttgatatcgcaatggacctgggttatgtctcgcagcagaccttctcccgcgttttccgtcggcagtttgatcgcactcccagcgattatcgccaccgcctgtaattttattgcccgcgcgttaactcccgcgcgggtaattgctccatccattgcataaacacctgcggcggcatcgccttcgcaaagaaccatccctggcaatagcgcacgccgcgtttgcgcagccagttaacctgctcctcagtttcgacgccttcagcgatcgtttttaaccccaggctgtgcgccagctcgatgatgtgttccgcaatcaaatgactggttttgtgggtggtcagcgtttcaacaaacgatttgtcgattttcaaaatatcgacattcaatgatttaaggttatgcaagttagagtagccaataccaaaatcatcaattgccacttcgtaacctgcctggcggaaagccagaataatcggcgtcattttgtcaacatcaagaaatgcatgctcagtcacttcaaatttaatttgctgcggacgcaccgcgtattgctctgttttctgattgattcgcgctatcaaccgtgacgtatgaaaatcggaggccgacaggttaatagaaacatagcgatctgcatgtgttgccaggtaatcgcccagatcgcggaagacattatcaataacataatcagttatctgttctatcatcccctccttttctgccagcggaataaactctgccggattcattatttgcccctgctcaccaggccaacgtaacaacgcttcagcgccgatacatttttctgttttgatatcgattattggctggtaataaagacaaagttgatgtttttcgagggcgcgttgcaatttacgtttgggagataaatagttttgtcgaatacgtagccagagtaatagcagaacaagactccccaaaataccggcgggcaacgcaaaaataagatgattataaaaatgggttataagacgttgatatgaagtcgcaacaatggctgcaattgggcgttttgtcgaataaactgtcgcatataaatagccatttctttgtacggttaaatccttcaaatgaatcagcggagaaaacgttgctgccgaggcctctttgcttaacgagaaaaaggttttcgtcaccgtatcatacacaccccattgcaatgtcgggtcatcagacatcacttcactccagaagagagggttgataaccgccacataatttccccgctgcatataggtcattttatagccagagaaaaaaggcgtatcgcggtaataatagatagaaacgttaggttcacgcttataatcggccggtgcaatcgtatagccgtttacaggcgctatcagcgatgagcataaaaaatggttatcacgggcatagatcaattcattaatataaagatagccacgaataatattcaacattcgcttttgatgggctggagtgcaaacttgcccctgatagcgttcagctgcatcgctcactaaatctgcctggcgaatgaccagctcggatttatccagtgccagttgagcaaaggttcggagctgattattcacttctgattttgcccaaaggaaggcaatccatagcgaaagaatgatgggaaagagaactaaaaagataatgcccggcaacgccagtaattggtgtcgtgcacaatgactcattgctatcaatttcctgcctgtttatacccggccattgcaaggtgaaaaccctgggtaccgacgtctttagataaatcttacggtataaatagcacttttgcctgatttgaaattgatacctttctaatcgtcacctggatgaaaataattcattgatattcaaaattaatttcctacaggaatgcagaggcggcgggaagatatgcccttaatgccactgaaaaaccacataatctgtacagcaataaaagtcacggcctaatatggctaacaaacaatcaattgtgatatagttcacaaaattaatgaaacaaacagagtgtttcatttttgtgttctgcaagccccgcgatagccagagtgtaccacgcctcccgtgaacaacgccgcgctgtccagggcatcggctcttttcagaggaattgtttgatggctaccctcaccactggcgtggttcttcttcgctggcaacttcttagtgccgtaatgatgtttctggccagcacactcaacatccgttttcgtcggtctgattatgtcgggcttgcggtgatcagcagcggtctgggcgttgtttccgcctgttggttcgcaatggggttgcttggcatcacaatggcggacatcaccgctatctggcacaacatcgagtcggtgatgatagaagagatgaatcagacaccgccacaatggccaatgattttgacctgatacgtagaagcctccataacggaggcttcttttttatggctggcagatgctttaatcatccaccttaaaacaatataacctattgttttaatgacaaatcaaaacggtagttcacataaactagcgaataaaccattcaactacttgaaagtgctggtttttataataaaaaaagccaaaactgttaagttgatcccaatattggctattttctgggcaggtactgcgggagtattggccgccaagcgtaaagatagaatcttgacacttttagcgacagcacctgagcaaaatatcggagaaatgaaatccatttcccgcttttactatcaagtttatctcaaattacgcgccacatacataatcaggctaaccatgcaaactctgcataattttcctagtacacccaatcgttgtgcgccaagggcatccgattcaacaaatctctgcgctctcgccaatcgggaagtagcttgtccatataccccttgaagcgttcattgtgattacgctcaagcaagtgcaccaattcatgcactaggatgtactccaaacactccggtggctttttagcaagctctaaatttagccaaatgcgctttgcctgaatattgcagctgccccacttggttttcatctttttaattccccaatctgcagctttaacgccgatcttatcttcccaaacaggcaataactcagcgattcgcgttttaagtgcatctcgataatatgagttcagtaccagtgccttgttctcaagcgttgttgcgggattgacatataaatgcaatcgaccacgacctagcttgatttcatgctttccggaacgctcgataagattcagacgataacgcctgccccacaggtaatgacattcaccgctaaccatttctcgatcagattggcgaggttgtttggcaaaatcactctgctgtttcttgatccaaggaatgcggctgatcactgccatacggattgcggtttctgtcatagattcaggagcagaaacacgcacacgcccatcaggtggcaacacgctgatatgaaggtttttaattgccttacgatttaactgcatcgcaatagaaccaatttctaccttaggcatcagtggtactctttttgcgctttagccaattccattacaccctgaatatccacatcataccccatcgtttcttctcgcaccgcattggcaatttctcgctccttaaatcgatctcccacccaatccgcttttttggtataacgaatggcactatctattttggtagccagcaattcatcttgaccaaaattatcgtaaaacgcgcgttttggattagagtccatcgatggcggatagttagccgctgtctgctccggacgtataaccttacgagatagctcgcggattttctccagatactcttggtattcaatcgctttttggcgacgaagctcaatcagctcgtccaataacaccgacatttgctcgtaatatttggggttaaccgggttttcatcaacgatggttttacgcacgttattttcgatggtttcggccatggcttcctgattcttacgaatactttcaggcaaagcctccacggcatcagcacctttttcaacgataagctcaattagccctagctcttcaaaatccatcagtacttcgctgtcatccgcacgaatatacatatctaacaagtggcgcatggcaggctcaaagcgtttcatttctaccaaatcgccactggccagttttacttcgtcacggactttttcaaaatgagccacttctgttcttatcgagtctacatcttgcgcagaatagcctgcatcaggcatttcattggcgatattggcgaacgcacgcagtagtttggcaacattctgataaagcgttaaacgcagagcctctttctcaataagctcgtcttggttcagacctgactcaccacaaaaataatgaatgtagtcttccgtgttacgtggcgcttttaccggctcacacaaggcgcgcaccatttccagcgcattatccaaatcgagcttggcttgctctaaacgatctttcagcagccctgcaacgtcttccttgtcataaccatcaaatgcgccttgagtataatcagaaatcgctttatccaacgagcggaacagatctttgtaatcaatgatgtaaccgtattctttatcatcgccatccaagcgattcacgcggcaaatggcctgaaacaggttgtgatcagccatctgcttgtcgatatacaaataggtagccgaaggggcgtcgaagccagtcagcaacttatcgaccacgatgagcaagcgcatttgccctggttcatcaataaattgttttttaacttctttttcaaactcttcaacacggtttgcggccttatcttctggttgctcgaagtaatccgcaagcattttgcggtaaatatcgtacttaaagagcttttccgttaagccttcaccggtttcttcccctttaatgctcgcagcggtcggctgaaaactggtgacaatagccaccttaccggctaaatctgtttggctgaacatttcataagctttacaagcttgatagacactagagcagaccaacatggcattgccgtagccatccatcaggcgtggcttagtgtccatatccagggtaatgactccaacttactgatagtgttttatgttcagataatgcccgatgacctgatggtgataccacgagctttttcttccggcgcgttatcgatctggtcgaatgcacgagcagcaccgccgtaggttttagccagtacggtggtgattgcagcggtcagagtagttttaccgtggtcaacgtggccgatagtaccaacgttaacgtgcggttttgtacgttcaaatttttctttagacacggctatattccttactatagtgctctccccttcaggagagagcacgggactttggtattaacccttaggcttatttaccacgggcttcaattacggcctgagcaacgttactcggcgcttcatcatacttcaggaattccatagtgtatgatgcacgacctttggtcagagaacgcagctgagttgcgtatccgaacatttcagacagcggtacttcagcgtggatcttaacgccagtaacttcagattcctgacctttgagcataccacgacgacggctcaagtcaccgataacgtcaccggtgttctcttccggagtttctacttcaaccttcatgatcggctcaagcagaactggtttcgctttcttaaagccttctttaaaggcgatagaagcagccagtttaaacgccagttcagaggagtcaacgtcatggtaagaaccgaagtgcagacgaatacccatgtctactaccgggtagcctgccagcggacctgctttcagctgttcctggatacctttatcaacggccgggatgtattcgccagggattacaccacctttaatgtcgttgatgaactcgtagcctttcgggtttgaacccggctccagcgggtacatgtcgataacaacatgaccatactgaccacgaccaccagactgtttcgcgtgtttaccttcaacatcggtaactttctggcggatagtttcacggtaagcaacctgcggtttacctacgttcgcttcaacgttgaattcacgcttcatacggtcaacgatgatgtcgaggtgcagttcgcccatacccgcgatgatggtctggttagattcttcgtcagtccatacacggaaagacgggtcttctttagccagacggcccagagccagacccattttttcctggtcagctttggttttcggttcaactgcgatggagattaccggctcagggaattccatacgttccagaatgatcggcgcatccgggtcacacagggtgtcaccagtggttacgtctttcagaccgatagcagcagcgatgtcgcccgcgcgaacttctttgatctcttcacgtttgttagcgtgcatctgaacgatacgaccgaaacgctcacgtgcagctttcacggagttcagtacggtatcaccagagttaaccacaccggagtaaacacggaagaaggtcaggttaccaacaaacgggtcggtagcgattttgaacgccagtgcagagaacggctcgtcatcacttgcgtgacgttcagccggagtgtctttaccgtcgtccaggataccgttgatcgcaggtacgtcaaccggggatggcaggtaatcaattaccgcatccagcatcgcctgaacacctttgttcttgaacgcagaaccacaggttaccaggatgatttcgttgttcagaacgcgctgacgcagagcacctttgatttctgcttcagtcagttcttcaccacccaggtatttttccatcagctcttcagaagcttcagctgcggattcgatcaggttctggtgccattcgttagccagttcaaccatgtctgccgggatatcttcgtattcgaaggttacgccctggtcagcgtcgttccagttgatagctttcattttcaccaggtcaacaacaccggtgaaatgttcttcagcaccaatcgccagctgcagcggaaccgggttcgcgcccagacgggttttgatctggttaacaactttcaggaagttcgcacccatgcggtccattttgttaacgaacgcaatgcgcggaactttatatttgtttgcctgacgccatacggtttcagactgcggctgaacaccaccaactgcgcagtaaaccattaccgcaccatcgagaacacgcatggaacgttctacttcgattgtgaagtcaacgtgccccggggtgtcgatgatgttgatgcgatgcggctcatactgcttagccataccagaccagaatgcagtagtcgcagcggaagtgatggtaataccacgttcctgctcctgctccatccagtccatggttgcagcgccgtcatgaacttcaccgattttatggtttacaccggtgtagaacagaatacgttcggtagtagtggttttaccggcgtcgatgtgcgcactgataccgatgttacggtagcgtgcgatgggtgttgtacgagccatttgtttcctcgtttatcttttaggcgttcaatttaagtagcccaaagcgggctgcttactggaagcgcccgcctggtgactaaaactccgaagggattaccaacggtagtgtgcgaacgccttgttggcttcggccatacggtgaacgtcttcacgtttcttaactgcagtacctttgttttctgcagcatcagaaagttcgttcgccaggcgcagagccatggatttatcaccgcgtttacgagcagcttcaacgatccaacgcattgccagagcattacgacgaaccggacggacttcaactggtacctgataagtagaaccaccaacgcggcgagacttaacttctacagtcgggcgcacgttttcgagagctacttcgaatgcttccagttcagatttaccagagcgctgagccagggtctccagcgcgctgtatacgatagattcagcagtagattttttaccatctaccatcaggatatttacaaatttagccagcagttctgatccgaacttcggatccggcagaattttacgctgaccaatgacgcgacgacgtggcatggaaatactccgttgttaattcaggattgtccaaaactctacgagtttagtttgacatttaagttaaaacgtttggccttacttaacggagaaccattaagccttaggacgcttcacgccatacttggaacgagcctgcttacggtctttaacgccggagcagtcaagcgcaccacgtacggtgtggtaacgaacacccgggaggtctttaacacgaccgccacggatcaggatcacggagtgctcctgcaggttgtgaccttcaccaccgatgtaggaagtcacttcgaaaccgttagtcagacgaacacggcatactttacgcagcgcggagttcggttttttaggagtggtagtatatacacgagtacatacgccacgtttttgcgggcatgcttccagcgcaggcacgttgcttttcgcaactttgcgagcacgtggtttgcgtaccagctggttaactgttgccattaaatagctcctggttttagcttttgcttcgtaaacacgtaataaaacgtcctcacacaatatgaggacgccgaattttagggcgatgccgaaaaggtgtcaagaaatatacaacgatcccgccatcaccaggccatctggctggggtgcttaaccgtaagtctgacgaaatcagtatagtcaatgagaatgatgtcgttcgaaatttgaccagtcaaaccgcgggcaataaggtcttcgttcagggcatagaccttaatgggggcattacgcagactttcaaggtagcggttaccgtcaactgcggcagttacgccatcttgcaataatagcagttcgtctccttcactgagcagacgcagcagcgcagcaaaatccgtcagccagggtgagcgatgtaatgtgtgcagcataaacgcctcaaaacctcaaaataacatcgtagttggcgagttcgcggcgtaaggcatctgcttcgagcggcgtggcttcgacaacaaagggtgtctgcggatctaacccgcgttcgcgcagtgaagccgcacaaacccagcactgttcaatgtcgtacagacccaacaatttaaaagtggcaatgtaatcacgcgccagcactgcatcgggcttttgtcctggcagcagctgaaaaacgccatcagctataaagaagacagccagatcgtcagttaatgcggaagttgccagtaaagcatctaaaccttcccggcctgcggctgtaccatgaggtgcagtagaaaaaacaaacgcaattcgtttcatcagaactgtaccaccctgtcacaggtcagcgaggcttccgccagcgccccaagtccgcttaaggtaaatccctgctgaaggtttgacgaagccagccccagtcttccggcctccgtttcatcaacaacgccacggcgtaatgctgccgctacgcagatattcagcgccacaccatgttgcgcattcagttgttgccaggcccgtacgaggtcaaattcgtcacttgccggagaggtcaattggttagcgttatagaccccttcccgatagaaaaagacgctgcttaactcatggccatctgctatcagcgcctgcgcaaactgaaaagcactactcgcctgttgcgtaccgtatgctggcccggtcaccacgatggcaaaacgcattacttatcttgcccctggaaatcaccgctcttgaactggcggatgtagagatagacagtgtgtttggagatgttcaggcggtcagcaacctggttgatcgcatctttaatatcgaagatccctttctcgtagagattcagcacgatctgacgatttttggcgttattagaaacattgcgatcggcattcacttcttcgatggtgaactccagcgtttgggtaaccagatcttcaacagaagaggcaaagttgacgcttgaaccgacatccggggtttctggcggcacaaaggtgctcataatctgcgagaagggaacatcaagattcatattgatgcacagcagaccaattacacgctgttcgcggttacgaatcgcgatagtcagggacttcattaatacgccgcttttggcgcgagtaaagtagcatttagaaacgctgctatccgctcccgtcatatcgtgcagcatacgtagcgccaggtcagtaattggcgaaccaatcttccggcctgtatgttcaccgttagcaatgcgaatggctgaacattttagatcctgcaaagagtgcaaaacgatttcacagtgggagccaataagcatcgctaacccgtccaccaccgcttcgtaggatttcagaatatcaaaatcggtctggtcgaaaggacgttgatccagtaaatccaactcactggtttcgttggttaaaagcgacctggacatgaaaaaaaacactccttttcaggagcctgtcgttaacttttcagggcaggctcattaatgatgcgggtaactaaattaatacagcggaggttccgctttccagcactaattatatccggcctgtaataaaaaaaccgccgcctggtcaggcggcggttcttaatgcttattttttagcagaatctgcggctttcgcatcagcttccggctttgcatcagccttcggcgctggtttcacatccagcagctctacgtcaaacaccagggtagaattcggtgggatccccggaacacccgctttgccgtaagccagttctggtggaataaccagtttgatcttaccgcctttcttgatgttcttcagaccttctgtccaacccgggataacaccgtccagacggaaagaaagcggttcaccacgggtgtaagagttgtcgaactctttaccgtcgatcagcgtacctttgtagttcactacaacagtatcgctgtctttcggtgcttcgcctttaccggcttctactacctgataaaccagaccagttgaagaggttttcacacctttctctttggcaaatttctcgcggtactctttaccttttgcttcgttatcagccgcgtctttttccatcttcgcctgagcagaagacttcacgcgagcttcgaatgcttgtagagtctgttcgatctcttggtcggagagtttgctcttatcagcaaatgcatcctgaacaccagcgatcagctgatctttatccagtttgatgcccagtttttcttgttcttttagagagttttccatgtaacgacccagcgaggcacccagtgcataagctgatttctgatcgtcatttttgaacgctgctttgctgtcagcagctgtagcaggttttgcagcttcagcagcaaaagtgattggtgcatgcagggcaacggccattgtggtcgccagcagcgttactttaaacagtgatttcatccatatctccaggatcggggcatctcaccccagggttaactattatcagaagggtactataaagcgttgtcgaacaaatctacatacagacacgccctattatcatctattttcagactctttttgtttaaattagtttcgatgaccgcgaaatgagtgctgtctcgggcagcaaagttaagtagaatccgcggcgaccattcgacaaaagaggtgaatcatgcaggatttatcattggaagcacgcctggcagagctggagagccgactggcttttcaggaaatcaccattgaagaactgaacgtcacggtgaccgctcatgaaatggagatggcgaaactgcgcgatcatctgcgtctgctgaccgagaagttaaaagccagccagccgtcgaacatcgcgtcgcaggctgaagaaacgccaccgccacattattgaggcgtaaaaaaagcggggattccccgcttttttgtcactttttcggtattagtggcaaccgcaaccgccgttgcctttaccgccacagcagccttcgccaccgtgttcatgaccgtgatcgtggccatgaccgccgcagcaaccgtcgtggtcgtgatcgtggtggtgatcgtgcgcgccgtgaacgtgaccatgagccagttcttcttcagtcgcttcgcgaatcgccacaacttcaacgttgaatttcaggttctgaccggccagcatgtggttaccatcaaccacgacgtgatcgtcttcaaccgcagtgatttcaaccggtaccggaccctggtcggtttcagccaggaaacgcatacctacctgcagttcatcaacgcccataaatacgtctttaggaacacgttgcaccaggttttcgtcgtactgaccgtaagcgtcgttcgcgccaacagcgacatcaaatttgtcgccaacttcatgaccttccagcgccgtttccaggccagagatcagggaaccgtgaccatgcaggtagtccagcggcgcactcaccggagactcatcaaccaacacaccgtcttctgtacgtacctgataggccaggctgaccaccaggtcttttgctactttcatgatatctcctgagcatgggaagaatagtggcgcagattgtagcggaattctgcagccgtgtactcactagcttaaaaaaactcggcgcatatcgctagtccggatgaaaaatcccgatcacttgctcatctttgcgaacgtgatcgcgggcttctttgtctgcttctcgcatctgatgtccgcacttaacacattcaacaatatcaatattattttcgcgccacatcgccattgaatcctgcgcctgacaggccgggcattttgcgcccgcaataaaacgttttcggattgccatctttaccctctactcaaattcatcccagccgtccagctggcgtcgttcttgttgcatttcacgctggaaaatctcttccagttcgcgtcgggcttccctggcgcgagaaatttgtacggtatcggcatgcattgggatgagctctcgcagcatccgcatatccaggcggcgaaaatgcagttgcgctcgctgtgcctgatgcggatgcatgccaagcgtgaccagcgtcttgcgccccagctctaacgcactggagaatgtttcacgggaaaactgcgtcacccctgcctgtaataactcatgcgcttccacacgtccgcgcgctcgcgcaagaatatgcaaatgcggaaagtgctgttggcatatttccaccagcttcatggtgtcttccggctcgttacaggtaatgacgatagactcagcggcctctgcacccgcagaacgtaaaagatcgacctgcgtggcgtcgccgtaataaactttgtagccgtatttacgcatcaggttaacggcgctgatatcccgctccagcacggtaatgcgcattttatttgccatcagcaaacgaccaatcacctgaccaaaacgcccgaagcccacgacaatgacctggggtttatcatcgttgacccacggtttttcgtcttcttcttccggtccgttaaactggcgggatagccatttatccaccagcttcatcagcaacggcgtggtcatcatggaaagcgtcaccgtcaccagcaacaacgccatctggtcgccctggaataagcgttgtgaagaagcggtagaaaagaggacaaaggcaaactcaccaccctgactcaacacgccagcaaactgcatccgctctgagctacgcacgccatacaatcgcgccagcagatacagcacgagaattttcaccgccaccagcacaaccacgcttatcactacccacaacagatgggtataaagcaccccgaggttgagtgacatgccgacagagataaagaacaaaccgagcagcaagcctttgaagggatcgatagccgtttccagttcatggcgatattcactttccgccagcagcacgcccgcaataaatgtaccgagcgccatcgacagccccagcgcatccataaacaatgcggaacccaacaccagcagcagcgtcgcggcggtgaacacttcccgcacgccagaagctgcaataaagcggaataccggacgcagtaaatagcgcccaccaatcagcatgccgacaaacgccagcaccttcatgccgaccttcatccagtcgaaatgttcgtctgccgaccccgccaacaacggcactaacgccagtgctgggattactgccagatcctgaaacagcagaaccgaaaacccgagctggccggattcgctgcgattcatccctttctcacgcatcaattgcaacgccattgcagttgaagacatcgcaaggccaatgccaccgaccaccgccgcctgccaggcgaaatccgtcagcatcaataatcccgccagcaacgccgcgcttaacagcacctgtgccgcgcctacgccaaaaatcgaacgccgcagttgccaaagtttggagggattcaactcaaggccgatgataaacatcaggaataccacgccgagttccgaaaagtggaggatctcatcgacgtcgctaataaaccccagcccccacgggccaattgcaatccctgccagcaaatatcccaacacagcgccaatacccagccgcgatgccagcggcaccgcagccaccgccgcgaagagaaacagcactcctgcgagtaaaaaatcggaaccttccatcagcggcctcctggagacagcggatttgccagccagtcaccgtaggctctggcgtggctcgccagctcctgtgcgctttgccgtctcgcccagtaaataatgatgggacttaaccaatgcatccggcacatgcccgccgccagttcaaaggggcgcagcacatcgctcatcgggtagcgattcagcgcgtcataacggtaagcactttccggctcgccggtggtattcacgctacgccagtactttcccgccagttggtttcctcccggcccgctggcaaaaccacgacttaatacccggtccagccactctttcagtagcgccgggcagctataggtataaagaggatgctgaaagacaatcacctcgtgctcgcgcagtaatgcctgctcacgggggatatcaataaaaaaatcgggatagtgcgcgtaaaggtcgtgcacggtaacattgctgagctgcgtggccggtttaagcagtacccggtttgccaccgagtcctgagattccggatgggcatacagcagcaaaactttcgctggctgagacatcatccccctcccggtatggtttttgtgtatagtcgctgttttgggctaccattgcgcccggtgcggcagctcgcccatacattacattatcataatgataagttaacatagtctgaacatacggcaccttatgattgttttctcctcgttacaaattcgtcgcggcgtgcgcgtcctgctggataatgccaccgccaccatcaaccctgggcagaaagtcggcctggtgggtaaaaacggctgtggtaaatctaccctgctggcattgctgaaaaatgaaatcagcgccgacggcggcagctacacctttccgggaagctggcaactggcgtgggtgaatcaggaaacgccggcgttaccgcaagcggcgctggaatatgtcattgacggcgaccgtgaatatcgtcaactagaagcgcagctacacgacgccaacgaacgtaacgacgggcacgccattgcgaccattcatggcaagctggatgctattgacgcatggagtattcgctcccgtgctgccagcctgctgcacggcctcggtttcagcaatgaacaactggagcgcccggtaagtgatttttccgggggctggcgtatgcgtcttaaccttgcccaggcgctgatttgccgttcagacttgctgctgctcgacgaaccgactaaccacctcgatctcgatgccgttatctggctggaaaaatggctgaagagctatcagggcacgctgatcctgatctctcacgaccgcgacttcctcgatccgatcgtcgataaaattattcatatcgaacaacaaagcatgttcgagtacaccggcaactacagttcgtttgaagtacagcgcgccacccgtctggcgcagcaacaagcgatgtacgaaagccagcaggaacgcgtagcgcatctgcaaagttatatcgaccgtttccgtgccaaagccaccaaagcgaagcaggcccagagccgcattaagatgctcgagcgtatggagctaattgcccccgcgcacgtcgacaacccgttccgctttagcttccgcgcgccggaaagcctgccaaatccgttactgaagatggaaaaagtcagcgcgggctatggcgatcgcattattctcgactcgattaaactgaacctggtgcccggctcgcgtattggtctgttaggccgcaatggcgcgggtaaatcgacattaatcaaactgttagccggtgaacttgcgccagtcagcggtgaaattggtctggcgaaagggatcaaactcggctacttcgcccagcatcaacttgaatacctgcgcgccgacgaatcacctattcaacatctggcacgtttagcgccgcaggagctggaacaaaaactgcgtgactacctcggcggctttggtttccagggcgataaagtaaccgaagaaacgcgccgcttctccggtggggaaaaagcccgcctggtgctggcattaattgtctggcagcggccgaatctgctgctgctcgacgaaccgactaaccaccttgacctcgacatgcgtcaggcactcaccgaagcattaatcgagtttgaaggcgcgctggttgtcgtttcgcacgaccgtcatttgctgcgttccaccactgacgatctctacctggttcacgatcgtaaagtcgaaccgttcgacggcgatctggaagattatcaacagtggttgagcgacgtacaaaagcaggaaaaccagaccgacgaagcgccaaaagagaatgcgaacagcgcccaggcacgtaaagatcagaagcgtcgggaagctgagctgcgtgcgcaaacccagccactgcgtaaagagattgcccgtctggaaaaagagatggagaagctgaacgcgcaactggcgcaggcggaagagaaactcggcgacagcgaactgtatgaccagagccgtaaagcggagttgaccgcctgcctgcaacagcaagccagcgccaaatccggcctggaagagtgcgaaatggcatggctggaagcccaggagcagcttgagcagatgctgctggaaggccaaagcaactgatggcgcagataacgacgaccgatgccaatgaattcagcagcagtgctgaattcatccccatgcgcggctttagcaattgtcatctgcaaaccatgctgccgcgtctgtttcgtcgtcaggtgaaattcaccccgtactggcagcggctggagttgcccgacggcgattttgtcgatcttgcgtggagtgaaaaccctgcacaggcgcaacataaacctcgtctggtggtgtttcacgggctggaaggcagtctcaacagcccttacgcccacggtctggttgaggcggcgcaaaagcgcggctggctgggcgtggtgatgcattttcgcggatgcagcggtgaaccaaaccgtatgcaccgcatttaccattcgggcgaaaccgaagacgccagttggtttttacgctggctgcaacgcgaatttggtcatgcgccaacggctgccgtcggctattcgctcggcggtaatatgctggcctgtttgctggcaaaggaaggcaatgatctcccggttgatgcggcggtgattgtctctgcgccgtttatgctggaagcctgtagctatcatatggaaaagggcttttcccgcgtttatcagcgttacttgctgaacctgttaaaagccaatgccgcgcgcaagctggcagcctaccccggaacgctgccgattaatctcgcgcagttaaaatcggtacgtcgcatccgtgaatttgacgatctcatcaccgccagaattcacggctacgccgacgctatcgactattatcgtcagtgtagcgccatgccgatgctgaaccggatcgccaaaccgacgctgattattcacgccaaagacgatccgtttatggatcatcaggtgatcccgaaaccggaaagtctccccccgcaggtggagtatcaactgactgaacatggcggtcatgttggctttattggcggtacattacttcatccgcaaatgtggctggagtcacgcattcctgactggttaacaacgtatctggaggcgaaatcatgttgattccgtggcaagacctctcccccgaaacgctggaaaatttaattgaaagctttgtgttacgtgaaggcaccgattatggtgaacatgagcgtacacttgaacagaaagtcgccgacgtcaaacgccagctacagtgcggagaagcggtgctggtatggtcggagctgcacgaaacggtcaatattatgccgcgcagtcagtttcgcgaataacctgcaaccgtcggcggacgagataataatgatagctaagtcatggagttactatgtctgccaaacatccggtcattgcggtaacaggatccagcggcgcggggaccaccaccaccagcctcgcgtttcgtaaaatattcgcgcagttaaatctgcatgcagctgaggtggaaggcgacagttttcaccgttacacccgcccggaaatggacatggcgatccgcaaagcgcgcgacgccgggcggcatatcagctacttcggccccgaggctaacgacttcggcctgctggaacaaaccttcattgaatacggtcagagcggcaaagggaaatctcgcaaatatctgcatacctacgacgaagccgtaccgtggaatcaggtaccggggacattcaccccctggcaacctttaccggaacccactgatgtactgttttatgaaggtttacacggcggcgtagtcacgccacagcataacgttgcgcagcatgtggacttactggtcggcgtggtgcctatcgttaaccttgagtggattcaaaaactgatccgcgacaccagcgagcgcgggcactcacgagaagcagtgatggactcagtagtgcgttcaatggaagactatatcaactacatcacaccgcagttttcccgcacccatcttaacttccagcgcgttcccaccgtcgacacttcaaacccgttcgcggcaaaaggtatcccgtcgctcgatgaaagctttgtggtgatccattttcgtaatctggaagggatcgatttcccctggctgctggcgatgttgcaaggctcattcatttcccacatcaatacgttagtggtaccgggcggcaaaatgggtctggcaatggaattaattatgctgccgctggtgcaacgattgatggaaggaaagaaaatcgagtaactctgctattacgccggataaaatactatccggcttcacaacgggatagttaagtcacgcggcaaccacttcatacgagtgagtaatattcaccgctttttccagcatcaacgccactgaacaatatttctcggcagagagatcaaccgcacgcgcaaccgctgcgtctttcaggtcgcgaccggtgacgataaaatgcagattaatgtgcgtaaacaggcgtggtgcctcttcgcggcgttcagaggtcaattttacttcacaatcgaccacatcctgacgccctttttgcaggatcgaaaccacatcgatggcactgcaaccacccgccgccatcaacaccatttccatcggacttggtgctttatcgcctgagttgccgtccattaaaatctgatgaccagaggcggattcgcccagaaaagttaacccttcgacccacttcactcgcgcttgcatttttgctactccactgcgtcaattttcctgacagagtacgcgtactaaccaaatcgcgcaacggaaggcgacctgggtcatgctgaagcgagacaccaggagacacaaagcgaaagctatgctaaaacagtcaggatgctacagtaatacattgatgtactgcatgtatgcaaaggacgtcacattaccgtgcagtacagttgatagccccttcccaggtagcgggaagcatatttcggcaatccagagacagcggcgttatctggctctggagaaagcttataacagaggataaccgcgcatggtgcttggcaaaccgcaaacagacccgactctcgaatggttcttgtctcattgccacattcataagtacccatccaagagcacgcttattcaccagggtgaaaaagcggaaacgctgtactacatcgttaaaggctctgtggcagtgctgatcaaagacgaagagggtaaagaaatgatcctctcctatctgaatcagggtgattttattggcgaactgggcctgtttgaagagggccaggaacgtagcgcatgggtacgtgcgaaaaccgcctgtgaagtggctgaaatttcgtacaaaaaatttcgccaattgattcaggtaaacccggacattctgatgcgtttgtctgcacagatggcgcgtcgtctgcaagtcacttcagagaaagtgggcaacctggcgttcctcgacgtgacgggccgcattgcacagactctgctgaatctggcaaaacaaccagacgctatgactcacccggacggtatgcaaatcaaaattacccgtcaggaaattggtcagattgtcggctgttctcgtgaaaccgtgggacgcattctgaagatgctggaagatcagaacctgatctccgcacacggtaaaaccatcgtcgtttacggcactcgttaatcccgtcggagtggcgcgttacctggtagcgcgccattttgtttcccccgatgtggcgcagactgatttatcaccccgatatcaactatgcacttcgacaaacgctggtgctatgtttgcccgtggccgttgggttaatgcttggcgaattacgattcggtctgctcttctccctcgttcctgcctgttgcaatattgcgggccttgatacgcctcataaacgttttttcaaacgcttaatcattggtgcgtcgctgtttgccacctgtagcttgctgacacagctactactggcaaaagatgttcccctgccctttttgctgaccggattaacgctggtacttggcgtcactgctgagctggggccattgcacgcaaaattgcttcctgcatcgctgctcgccgccatttttaccctcagtttggcgggatacatgccggtctgggaaccgttgctcatctatgcgttgggcactctctggtacggattgtttaactggttttggttctggatctggcgcgaacaaccgctgcgcgagtcactaagtctgctgtaccgtgaactggcagattattgtgaagccaaatacagcctgcttacccagcacaccgaccctgaaaaagcgctgccgccgctgctggtgcgccagcaaaaagcggtcgatctaattacccagtgctatcagcaaatgcatatgctttccgcgcaaaataatactgactacaagcggatgctgcgtattttccaggaggcgctggatttacaggaacatatttcggtcagtttgcatcagccggaagaggtgcaaaagctggtcgagcgtagccatgcggaagaagttatccgctggaatgcgcaaaccgtcgccgctcgcctgcgcgtgctggctgatgacattctttaccatcgcctgccaacgcgttttacgatggaaaagcaaattggcgcactggaaaaaatcgcccgccagcatccggataatccggttgggcaattctgctactggcatttcagccgcatcgcccgcgtgctgcgcacccaaaaaccgctctatgcccgtgacttactggccgataaacagcggcgaatgccattacttccggcgctgaaaagttatctgtcactaaagtctccggcgctacgcaatgccggacgactcagtgtgatgttaagcgttgccagcctgatgggcaccgcgctgcatctgccgaagtcgtactggatcctgatgacggtattgctggtgacacaaaatggctatggcgcaacccgtctgaggattgtgaatcgctccgtgggaaccgtggtcgggttaatcattgcgggcgtggcgctgcactttaaaattcccgaaggttacaccctgacgttgatgctgattaccaccctcgccagctacctgatattgcgcaaaaactacggctgggcgacggtcggttttactattaccgcagtgtataccctgcaactattgtggttgaacggcgagcaatacatccttccgcgtcttatcgataccattattggttgtttaattgctttcggcggtactgtctggctgtggccgcagtggcagagcgggttattgcgtaaaaacgcccatgatgctttagaagcctatcaggaagcgattcgcttgattcttagcgaggatccgcaacctacgccactggcctggcagcgaatgcgggtaaatcaggcacataacactctgtataactcattgaatcaggcgatgcaggaaccggcgtttaacagccattatctggcagatatgaaactgtgggtaacgcacagccagtttattgttgagcatattaatgccatgaccacgctggcgcgggaacaccgggcattgccacctgaactggcacaagagtatttacagtcttgtgaaatcgccattcagcgttgtcagcagcgactggagtatgacgaaccgggtagttctggcgatgccaatatcatggatgcgccggagatgcagccgcacgaaggcgcggcaggtacgctggagcagcatttacagcgggttattggtcatctgaacaccatgcacaccatttcgtcgatggcatggcgtcagcgaccgcatcacgggatttggctgagtcgcaagttgcgggattcgaaggcgtaatgcaggctaaaccatcggataaggcattcacgccgcatccgacatcttttgcctgatgcttcgtatttacgccccaaccaccttcgccaccgcgtgggcgaaacgttgcatcccttcatcgatatccgcatcttccaccaccagcgacggtgcaaaacgcatcacatccggtccggcattcagcaccattacgccagcctctgcgcccgcatacaggaaatcacgcgcccgacctttgtactgtggtttcagctctgcgccaatcaacagccccataccgcgaatatcgctaaatacatcgtactgctgatcgatcttctgcagatggtcaacaaaacgctggcgtttcgcctgaatgccttccagcacttcaggggtattgatgatatcaaacgccgcccccgctactgcacaggccagaggattaccgccgtaggtggaaccgtgagaaccaggatgaaacgcagaagcaatttccgccgtggtcagcatggcgctaatcgggaagccgccgcctaacgctttcgcagaggtcagaatatccggcgtaacgccgtagtgcatgtaagcaaacaaatcgccggtccgccccatcccgcactgcacttcatcaaacaccaataatgcctgatgttgatcgcacagctcgcgcaagccctgcaaaaactctggcgtcgctgccgtcacaccgccctcgccctggatcggctcaaccaccaccgcacaggtgtgatcatccatcaccgctttcactgcatggagatcgttaaagggaacgtggatgatgtctgccggtttcggcccaaagccgtcggaatattttggctgcccacccaccgaaacggtaaacagcgagcgaccatgaaaagcgttatggaaggcaataattttggttttgaacgggctatgacgcacacaggcgtaatggcgtgccagtttaaaggcggtttcgttagcttccgtgccggagttcataaacaccacgcgttcggcaaacgttgcctcaatcagtttacgcccaagacgcagcgccggttcattggtgaaaacgttactgatatgccacagagtttcgccctgggtttttaacgcgttcaccagcgcaggatggcaatggcccaacgccgtaactgcaatgccacccgcgaaatcgacatactccttgccttgctgatcccagattcggctgccctgaccttttaccggaataaactctgccggagcataaatcggcaggatcacttcatcgaaagtcgcgcgtgtaattgctgtttgttcaattgccatctcatgatcaccctgttacgcataaacaaatgtgaaattataaccacaaaatatgcataaaaaatcactaaatggcaatcagaaatcagcgatgcaggaaattagccagcagttgatgtccttgttcgctaagaatactttctggatggaactgcacaccttccagatcccactggcgatggcgaatccccataatctcgcgggtttcgctccaggccgtcacgtcaaagcacgctggtaatgagtcaggttccaccaccagcgaatggtagcgtgtcacggtaagtggatttgccagcccccgaaatacgccctcaccgttatgtgtaatcggcgaggttttgccgtgcatgacctttgcggcgcgcacaactttaccgccaaatgcctgcgccattgcctgatgaccgaggcagacgccaagaatcggcaagcgcccggcatagtggcgaataacgtcaagagagatcccggcttcatctggcgtacaggggccaggtgagatgacaattttttgtggtttaagggcgtcgatatccgccagcgtcaacgcatcgttgcgcttaaccagcacatccgcccccagttcacaaaagtactggtagaggttccaggtaaaagaatcgtagttatctataagcaggatcatggcggctccggtacaaaagaaccgcgctattttactcagattccccggcttcgcttaccactttgctaaatatcatctgcagtgcggtgagatcccccattgccccactctgatttgcctgattccaggcctctttttcgataccctgccagctcagttgatatccggcatgaatcgccagttgctcgaagaagatccgctgtgccagaccacttcccacccggaagggatgcagcacgttgatttcacaatagtaatgcgccagccgctcgacgaacttcgctttctccaggccaaccagataaccttcttcctccagatcctgcatcagggcattgccctctttttcgatataagcaaagtggcagaacggcatatcaccctgataaatatcaacttcacgcagttgccctgcccagtcgaaaatatcctgatacagctggcgatggatagttcgcaaatgcggtaaaccgcgcaccagcggaccaagctcaatggtcgcagcacgcagcgccgtcatttcgtaagcggcctgttccagccgctgctgctggcggatgttcagccggttacgcatgatatcaaggcctggataaagatacggatcgcgcccttcgccgaatttatcgctcatagtgactcctcagctcttcaaggcgcgctaaagcctctgcggcagtaagagtgactaaaggcatctcgacgccttcaagacggcgactggcctgaaaattacgattacgctgaagctcccagagacgggacttttgcttatcggtgagtttcttcacttgatgcctccctgaacgtgtccatttgccacaagtataagcggcaaatccgggttacgccgggagagcagaagcgcgggcaagattgcccgcgcgagaaatcattacggcaggactttagcggaaaggataactaccggttttgacggcacattctggtacggaccaacgtcatgagtcggcacctgggaaatcttatcggcaacgtccatgcctttcaccactttaccaaataccgcgtaaccgaaatcacgctgaccatggtcaaggaaggcgttatcggcaacgttgataaagaactggctggtggcgctgtctttgtcagcggtacgtgccatcgcgatggtgccacgcgtgttgcgcaggccgttatcggcttcatttttgattggcgggtttggttttttctgctgcatctgctcggtgaaaccgccgccctgaatcataaagccaggaatgacgcggtgaaaggtagtgttgttataaaaaccgctgttcacataatcgacaaagttttgcacagacactggcgctttttgtttatccagctccagttcgatgttaccagctgaggttgtcaacaatacgtgcgggtcccctttcgctgccattgctgcgggagaaagagcagaaagagcgaaaacagcagccatcgccgccagggtcgatttgaacatgagatttccttaacaaacagagcagaaaaaaagcaagtgaagagattctaaatagccttcaagaacaaggccatccctttacctaattttacgtatctgaaatatatgtaacctgacgatcactttttattccgtgatcaaaatcacctcttaaaatgcaatttagcaaccgattgcaataaaacatttaaacagatcacaaaatcacctaaaatcgcccgctcgcggcatatcccgctatgccattttatttttgaacgcaggccaatcatgactaacagcaatcgcatcaagctcacatggattagctttctctcctacgcactgactggtgcgttggttattgtcaccgggatggtgatgggaaatatcgccgattatttcaatctgcctgtttccagtatgagtaataccttcaccttcctcaacgccggcattttaatctctatcttcctcaacgcctggctgatggaaatcgtcccgttgaaaacgcagttacgttttggctttctcctgatggtgctggcggttgccggtttgatgttcagccacagcctggcgctgttctcggcggcgatgttcattctcggggtggtcagcggcatcaccatgtcgattggtacattcctggtaacacaaatgtatgaagggcgtcagcgcggttcccgcctgttatttaccgactccttcttcagtatggctgggatgattttcccaatgatcgccgcgtttctactggcgcgcagcattgagtggtactgggtttatgcctgcatcgggctggtgtatgtcgctatttttattctgaccttcggctgtgagttcccggcgctgggcaaacatgcgccaaaaacggatgctccggtagagaaagaaaagtgggggatcggcgtactgtttctctctgttgcggcgttgtgctacatcctcggtcagttaggttttatctcctgggtgcctgagtatgccaaaggcctgggcatgagcctgaacgacgcgggcacgctggtgagtaacttctggatgtcatacatggtcggcatgtgggcgttcagctttattcttcgcttctttgatttgcaacgcattctgaccgtactggctggtctggctgcgattctgatgtacgtctttaacaccggaacaccagcacatatggcgtggtcaattctcgctctgggcttcttctccagcgcgatctataccaccatcatcaccctgggttcacagcagaccaaagtaccgtcgccaaaactggttaactttgtcctgacctgcggaaccatcggtactatgttgacctttgtggttaccggcccgatcgttgaacatagcggtccgcaggcggcactgcttacagcaaacggtctgtacgctgtcgtctttgtgatgtgcttcctgttaggtttcgtcagccgtcaccgtcagcataacaccctgacctctcattaattgctcatgccggacggcactatcgtcgtccggccttttcctctcttcccccgctacgtgcatctatttctataaacccgctcattttgtctattttttgcacaaacatgaaatatcagacaattccgtgacttaagaaaatttatacaaatcagcaatatacccattaaggagtatataaaggtgaatttgatttacatcaataagcggggttgctgaatcgttaaggtaggcggtaatagaaaagaaatcgaggcaaaaatgagcaaagtcagactcgcaattatcggtaacggtatggtcggccatcgctttatcgaagatcttcttgataaatctgatgcggccaactttgatattaccgttttctgtgaagaaccgcgcatcgcttatgaccgcgtacacctctcgtcttacttctctcaccacaccgccgaagagctgtcgctggtgcgcgaaggcttctacgagaaacacggcatcaaagttctggtcggcgaacgcgctatcaccatcaaccgtcaggagaaggtgattcactccagcgccggacgtaccgttttttatgacaagctgatcatggcaaccggttcctacccgtggatcccgccaatcaaaggttctgatactcaggactgctttgtctatcgcactattgaagacctcaacgccattgaatcctgcgcccgtcgcagcaaacgcggtgccgttgttggtggcggcctgttaggtctggaagccgcaggcgcgctgaaaaacttaggtattgaaacccacgttatcgaatttgcccctatgctgatggcagaacagcttgatcagatgggcggcgagcagctgcgtcgcaaaatcgaaagtatgggcgtgcgcgttcacaccagcaaaaacacccttgagattgtgcaggaaggtgttgaagcgcgtaaaaccatgcgttttgccgacggcagcgaactggaagtcgactttatcgtcttctctaccggtatccgtccgcgcgataagctggcaacccagtgtggtctggacgttgctccgcgtgggggtattgtcattaatgattcctgccagacttccgatccggatatctacgccatcggtgaatgcgcaagctggaacaaccgtgtatttggtctggtagcacctggctacaaaatggcgcaggtcgccgttgaccatattctcggtagcgaaaacgcctttgaaggtgctgaccttagcgccaagctgaaactgctgggcgtagacgtaggcggtattggtgatgcgcacggtcgcacgcctggcgcacgtagctacgtttacctcgacgaaagtaaagagatctacaaacgcctgattgtcagcgaagacaacaaaaccctgctcggtgcggtactggtgggcgataccagcgactacggtaacctgctgcaactggtgctgaacgctatcgaactgccggaaaacccggattccctgatcctgccagcacactcgggtagcggcaagccgtctatcggtgttgataaactgccggacagcgcgcaaatctgctcctgcttcgacgtcaccaaaggtgatctgattgctgccatcaacaaaggctgccacacagttgcggcgctgaaagctgaaaccaaagcgggtactggctgcggtggctgtatcccgctggtcactcaggtactgaacgcggaactggcgaaacagggcatcgaagttaacaacaacctgtgcgaacactttgcttattcgcgtcaggaactgttccatttgatccgcgttgaaggcattaaaaccttcgaagaactgctggcgaaacacggcaaaggctacggttgtgaagtttgtaaaccaaccgtcggttcgctgctggcctcctgctggaacgaatacattctgaagccggaacatactccgctgcaggattctaacgacaacttcctcgctaacatccagaaagacggcacctactcggtgatcccgcgttctccgggcggtgaaatcaccccggaagggctgatggcggtaggtcgtatcgcgcgtgaatttaatctctacaccaagatcactggctcccagcgtctggcgatgtttggcgcacagaaagacgatctgccggagatctggcgtcagctgattgaagccggcttcgaaaccggtcatgcctatgcgaaagcactgcgtatggcgaaaacctgcgtgggtagcacctggtgccgctacggcgttggcgacagcgtcggcctcggcgtggaactggaaaaccgctacaaaggcatccgtacgccgcacaaaatgaagttcggtgtctccggctgtacccgtgaatgttcagaagctcagggtaaagacgtgggtattatcgccactgaaaaaggctggaacctgtatgtttgcggtaacggcggcatgaaaccgcgtcatgcggatctgctggcggcggatatcgatcgcgaaacgctgatcaaatatctcgaccgcttcatgatgttctacatccgtactgccgacaaactgacgcgtaccgcaccgtggttagaaaacctcgaaggcggcatcgattacctgaaagcagtgatcattgacgacaaactggggctgaacgcacatctggaagaagagatggcgcgcctgcgtgaagcggtactgtgtgagtggactgaaacggtcaatacgccgtctgcgcagactcgcttcaaacacttcatcaacagcgacaagcgtgacccgaacgtgcagatggtgccagagcgcgaacagcaccgtccggcaacgccgtatgaacgtatcccagtaactctggtggaggacaacgcatgagccagtggaaagacatctgcaaaatcgatgacatcctgcctgaaaccggcgtctgcgcgctgttaggtgacgagcaggtcgcgattttccgcccgtatcacagcgatcaggtgtttgcgatcagcaacatcgacccgttcttcgagtccagcgtgctgtcacgcggactgattgcggaacaccagggcgagctgtgggtcgccagcccgctgaaaaaacagcgttttcgcttaagcgacggcttgtgcatggaagacgaacagttttccgtcaaacattacgaagcgcgagtgaaagacggcgtggtgcagctgcgcggttaatgttttaacgggaggcgcaatgcctcccctttttgcatggtcctgtaataatcttcggtatattgcaggacattttttaaactttttgttttattttttgtttttattttttaaaggataatcaaatgtttacagacactattaataagtgtgcggctaacgctgcgcgcattgcacgcctgtcggcaaataacccgctcggcttttgggtcagctccgccatggcgggcgcgtatgtgggtcttgggatcatcctgattttcacgctcggtaatttgctcgatccatccgtacgccctttggtgatgggcgcgacctttggtatcgccttaacgctggtgattatcgccggttctgaactgttcaccggacacaccatgttcctcacctttggggtaaaagcgggcagcatcagccacgggcaaatgtgggcaatcctgccgcaaacctggctgggtaacctggtcggttccgtcttcgttgccatgctctatagctggggcggcggtagcctgctgccggtagataccagcatcgttcactccgtcgcgctggctaaaaccactgcaccggcaatggtactcttcttcaaaggtgcattgtgtaactggctggtttgcctggcaatctggatggcgctgcgcactgaaggggcggcgaaatttatcgctatctggtggtgtctgctggcatttatcgcgtccggctacgagcactctatcgctaacatgacgctgttcgcgctctcctggttcggcaaccacagcgaagcctacacgctggcgggtattggtcataacctgctgtgggtgacgctgggtaatactttatcaggtgccgtattcatgggattgggttattggtatgctacgccgaaagcgaatcgtccggttgcggacaaatttaatcaaactgaaacggctgccggttaattactaaggggtttttacgtggatcatttgcctatattttgccaattacgcgatcgcgactgtctgattgtcggcggtggtgatgtcgcggaacgcaaagcaaggttgctgttagacgcaggcgctcgcttaacggtgaatgcattagcgtttattccacagttcaccgcatgggcagatgcaggcatgttaaccctcgtcgaagggccatttgatgaaagccttctcgacacctgctggctggcgattgcagcgacggatgatgacgcgcttaaccagcgcgtcagcgaagccgctgaagctcgtcgcatcttctgtaacgtggtcgatgcgccgaaagccgccagctttattatgccgtcgattattgaccgctcaccgctcatggtagcggtctcctctggcggcacctctccggttctggcacgcctgttgcgcgaaaaacttgaatcactgctgccgttacatctgggccaggtagcgaaatacgccgggcaattacgcgggcgagtgaaacaacagttcgccacgatgggtgagcgtcgccgtttctgggagaaattgttcgttaacgaccgcctggcgcagtcgctggcaaacaacgatcagaaagccattactgaaacgaccgaacagttaatcaacgaaccgctcgaccatcgcggtgaagtggtgctggttggtgcaggtccgggcgatgccgggctgctgacactgaaaggactgcaacaaattcagcaggcagatgtggtggtctacgaccgtctggtttctgacgatattatgaatctggtacgccgcgatgcggaccgtgttttcgtcggcaaacgcgcgggataccactgcgtaccccaggaagagattaaccagatcctgctgcgggaagcgcaaaaaggcaaacgcgtggtgcggctgaaaggtggcgatccgtttatttttggccgtggtggcgaagagctggaaacactgtgcaacgcgggtattccgttctcggtggttccgggtattaccgcagcttctggttgctctgcctattcgggtattccactcacgcatcgcgattatgcccagagcgtacgcttaattaccggacacttaaaaaccggtggcgagctggactgggaaaacctggcggcagaaaaacagacgctggtgttctatatggggttgaatcaggccgcgactattcagcaaaagctgattgaacacggaatgccaggcgaaatgccggtggcaattgtcgaaaacggtacggcagtcacgcagcgcgtgattgacggtacgctcacacagctgggagaactggcgcagcaaatgaacagtccatcgctaattattattggtcgggttgttggcctgcgcgataaactgaactggttctccaaccattaatttaacccgggccagagaattctggccttcttaatgactctttttatatattcagcaaataaaacatagccccttaataaatattatctgctaatgggttatattcaccgttacagcgacttacaaaattaagtcattcgctcactgacgccaattaaatattcctgtatcgttcttaacgagcagtctgcttatattcatataatcaatgaatattaattaatatataatacatagggaatgtaaatgaacaaatttattaaagttgcactggtaggtgcagtactggctacgttaactgcatgtactggtcatattgaaaaccgtgataagaactgctcttacgactacctgctgcacccggcaatttctatttctaaaatcattggcggttgcggtcctactgcacagtaagtctctgacagaaatcggctaacaccggtttaattgcccgacgccctctggattttccgagggcgtatttgtttctatgtccttcttgcccccgcccgtaaaaatattttcactttaaattcaatttgataactacatccattagccacagcgcgatcctgtgcgaaattttgtgatcttcctccacattacataacatcatatgttgttatattcatcatgcattgtcatgttaccttttaaatgactgcaaactctcccctacaacgtattggacaagaaaaaggtatcgctatgggaagccaggaactccaacgcaagctcggattttgggccgttcttgcaatcgccgtcgggacaaccgtcggctccggtatttttgtatctgtgggtgaagtggcaaaagcagcgggcacgccgtggcttacggtgctcgcgtttgtcattggcgggttaattgtgatcccgcaaatgtgcgtctatgcggaactatccaccgcttatccggaaaatggcgcagattatgtttatctgaaaaatgccggaagccgaccgctggctttcctctccggctgggccagcttctgggccaacgatgcgccgtcattgtcgattatggcgctggcgattgtcagcaatcttggctttttaacgcctatcgatccgttgctcggtaaatttatcgccgccggattaattatcgcctttatgttgctacacctgcgctccgttgaaggcggcgcagcgtttcagacgctaattaccatcgccaaaattatcccgttcactatcgtcattggccttgggatcttctggtttaaagcggagaattttgccgcccctaccaccactgcgattggcgcaacgggcagctttatggcgctgctggcggggatctctgccaccagttggtcgtataccggcatggcctctatctgttatatgaccggcgaaattaaaaaccccggaaaaaccatgccacgagcgctgattggttcctgtctgctggttctggtgctctacaccctgctggcgctggtgatttccggcctgatgcccttcgacaaactcgccaattctgaaacgccgatttccgacgccctgacctggatccccgcactcggcagcaccgctgggatctttgttgccatcacggcgatgatcgtcattcttggttcgctttccagctgcgtgatgtaccagccgcggctggaatacgcgatggcgaaagacaacctgttctttaaatgcttcggccatgtgcatccgaaatacaacacgccggatgtctccatcatcctgcaaggggcgctggggatcttcttcatcttcgtttccgatctcaccagcctgctgggttatttcaccctggtgatgtgtttcaaaaataccctcaccttcggctccatcatctggtgtcgtaaacgcgacgattacaaaccgctgtggcgtactccggctttcgggctgatgaccaccctcgccattgcgtcaagcctcattctggtcgcctcaacctttgtctgggcaccgattcccggccttatctgcgccgtcatcgttattgctactggtctgcctgcttacgccttctgggcgaagcgtagccgccagctcaacgctttgtcgtaatgttatctggagaaaataaaatgttggatattgataaaagcaccgtggactttctggtcaccgaaaatatggttcaggaagtggaaaaagttctcagccatgacgttccgctggtgcacgccatcgtggaagagatggtgaagcgcgacattgatcgtatttatttcgttgcctgcggatcgccactcaacgcggcgcaaacggcgaaacatctggcggatcgcttttccgatcttcaggtctacgccatttccggctgggagttctgcgataacaccccgtatcgcctcgacgatcgttgcgcagtaattggcgtttctgactacggtaaaaccgaagaggtaatcaaagcgctggagctgggccgggcctgcggcgcactcactgcggcgttcaccaaacgcgcggatagcccgattacctcggcggcggaatttagcattgattatcaggccgactgtatctgggaaattcacctgctgctctgctacagcgtggtgctggagatgatcacccgcctcgcgccgaacgcggaaatcggcaagatcaaaaacgatctcaagcagttgccgaatgcgctcggtcatctggtacgcacctgggaagaaaaaggccgccagcttggtgaactggccagccagtggccgatgatttataccgttgctgcgggtccgctgcgtccgctgggttacaaagaaggcattgtaacgctgatggaatttacctggacgcacggctgcgtgattgagagcggagagttccgccatggcccgctggagattgtcgaaccgggcgttccgttcctgttcctgctcggcaatgatgaaagtcgccacaccaccgaacgcgccattaactttgttaaacagcgtactgacaacgtgatcgtcatcgattacgccgaaatttcgcaagggctgcacccgtggctggcaccgttcctgatgttcgtgccaatggagtggctctgctactacctgtctatttacaaagatcacaacccggatgaacgccgctattacggtggtctggtggaatattaatccctctcccggcccggcaacgggccggatttacgcaaggagttacccgatgaaaacaggtatgtttacctgcggccaccagcggctgcctattgaacacgcatttcgtgatgcaagcgagctgggttacgacggcatcgaaatttggggcggtcgcccgcacgcgttcgcgccggacttaaaagcgggcggcatcaaacaaatcaaggcgctggcgcagacgtatcagatgccgattatcggctatacgccagaaaccaacggctatccgtataacatgatgctgggcgatgaacatatgcgtcgcgaaagcctcgacatgatcaagctggcgatggatatggcaaaagagatgaacgcgggttatacgctgatttccgcggcccacgcgggctatctcacgccacctaatgttatctggggacggctggcagagaacctaagcgaactgtgtgagtacgcggaaaacatcggcatggatctaatcctcgaaccgttaacgccgtatgaatcgaacgtcgtgtgtaatgctaatgatgtgcttcatgcgctggcgctggtgccttcgccgcgcctgttcagcatggtcgacatttgcgcgccgtatgtccaggcggaaccggtgatgagttatttcgacaaactgggcgataaattacgtcatctgcatattgtcgacagcgacggggccagcgacacgcattacattcctggagaaggcaaaatgccgctgcgggaactgatgcgcgatattattgagcggggctatgagggttactgtacggtggagctggtgacgatgtatatgaacgagcccagactctatgcccgccaggcgctggaacgctttcgcgcgctgctgccggaggatgagagatgaaaaccctggcgacaatcggcgataactgcgtcgatatctacccgcaactgaataaagcgttttctggcggtaatgcggtcaatgtggcggtgtactgcactcgctacggcatacagccgggatgcattacctgggtgggtgacgatgactacggcacaaagctgaagcaggatctcgcccgcatgggcgtcgatatcagccatgtccatacgaaacacggcgttaccgcacaaactcaggtggaactgcacgacaatgatcgcgtttttggcgactacaccgaaggcgtgatggccgactttgccctgagtgaagaggattacgcctggctggcgcagtatgacattgtgcacgcggcaatctggggacatgcggaagacgcattcccacagctgcacgctgcgggcaaacttaccgctttcgacttctccgacaagtgggacagcccgctctggcagacactggtgccgcatctcgattttgcctttgcctccgcaccgcaagaagacgaaacgctgcgtctgaagatgaaagcgattgttgcccgtggcgcaggaacagtgattgtcacgctgggtgaaaacggcagcattgcctgggatggcgcgcagttctggcgtcaggctcctgaaccggtgacggttatcgacaccatgggtgccggagattcgttcattgccggattcctttgcggctggtctgcggggatgacattaccgcaggcgatagcgcagggaacggcgtgcgcggcgaaaaccattcagtaccacggtgcctggtaggtataacgttggcgtgagcatcttcacgccaacgtgctgttacttgccggaaaacgaccctataatccgagtaattcattctttatttcagggtcgattatgtcagctacggaccgctactctcatcaactcctctacgctaccgtccgccagcgactgctggatgatatcgcgcagggggtttaccaggccgggcaacagatccctaccgaaaacgagctttgtacacaatataacgtcagccgcattaccattcgcaaagccatcagcgacttagtggcagacggcgtactgatccgctggcagggaaaaggcacctttgtacaaagccagaaagttgaaaacgccctgcttactgtcagtggttttaccgattttggcgtctcacaaggcaaggcgacgaaagagaaagtgatcgaacaggaacgggtcagcgccgcgccgttttgcgaaaagctgaacatccccggaaacagcgaagtgttccatctctgccgggtgatgtatctcgataaagagccgctgtttattgatagttcatggatcccgctgtcgcgttatcctgactttgatgagatttacgtcgaaggaagctccacctatcagttatttcaggagcgttttgacacgcgagtggtcagcgacaaaaagaccatcgatatctttgccgccacccgcccgcaggcaaaatggctgaaatgcgaactgggcgaaccgttgtttcgcatcagcaaaatcgcctttgatcagaatgacaaaccggtgcacgtctccgaactcttctgccgcgccaatcgcatcaccttaactattgataataaaagacattaaccgtaggccggataagatgcgccagcatcgcatccggcgatgctggcgcgttgaattttacatcccgtacgttcccctcaccctaaccctctccccaaaggggcgaggggaccgttcagtacggaatttagcttgacggtgctatccagcattaaatactggcaatactctcacgcaaaatccgcagcaccgtctcttcaccgctgcgattcgggttaatgcgaatcgcacaatgttctgattgtggattcgcctggcgaaacgttccggaaaggcgataaaagagcggcgggatttcatatttcgactctgcacccaccgggtaaggcaaggcaccgcgcttttgcgcctcttccagcactctggcggcaatcggctgatgaaactcgacaatcaacaccttcgactgcgcattagcaatcaccgcgcttttcacttccggcaccgcaccaccgttaagcaaagccagcaaccgttcagatacccctgcctgcaccgcgtgcatcactggcgcaaacaccagaccacgcaatacttccagcgcctgtgcgccctggatctggctaccgccggagtaaagcgtggcgcgaatacggttgataacatcagcatcgccgaccactgcaccaacaccctctggcccaaatagcttgaagcaggaaaatgtcgagacattcgcgccgcattcacagccgattcgcgccaccttcatcaccgcatagttgtcatcggttaacgctggaacacctgccgcgcgcaacgttgccagcacatctgccagcacgtagctgtcctgcggctgctggcgcgtatgctgcaccagcgccgcatccggttgttgctcgtcgacgacctgcttcagtgccgacaggtcattgaaatcaacagtaataagcgtcagccccatctgctcaataataacccgtgtcgtcgggtaaacaggcgcgtcatgcaccagaagacgctgccccggtttgagcaaagccgccagcccggcgcgaatcgcgccagtccccgcgccctgcaccagcgccgcagcctgtgcgtgaaatgcatcagccagcacctgctccacccgttgggtaatacgcggttgattcagccccggcgttaagcccaaatcaccgctggttagaaactccgcgccgggaaagtgacggcaaatcgtgtccaccagcgcaaactgcttttgctgcgcctcaataagcgtcaggctttgcagaggaaacgtcttcataggtgccttccttaagccggaacgaacaggccaagccagtaaagaacattcagcagaataccggtgatcattactgccacgaccggtgccgccattttctgtaccggacggcccagggattcgttgaggaagtaaatggcaaccgcgatagagaatccggtataacccgccatcttaattgctgcgaaaatcgaaccgaccagcagcgccacttccatcagcatattcatggcgttacggatgttatccgacgcattacgcaccgacgggtagcgtcccagccatttgccgatcgaacgaagcagcaagacttccgccgaaataaccactgcgcctaataccgctgcaaccatcggattcggcgagagatagcccaccgcataaacaaaggtaaagcccgcaactgcatacacacccgttgctaaggcggtggtggcaatcaacggtacaaaacccagcccgcgcataaattctgccagtgccgcctggttgatcagcgtttgcgattgttccggcgttacgcctgcggagtacgctttctccagagtgaagatcgacacttcactgccggcgaaaatcttcatgctggcaacggcggcaatcaatgctcccacgatggcgatatagggtaagtttttgataatccgcgacgtgcgttcttcaaacaccgaaagcccgctggcatcaatatcattttcatcacgatgacgcaggtcgtgagttatcgcgatccccagcagcatcaccatgccaataaagatttcgatggattcagggttaagatgtgggaaatagcgcacgactaccacacgggtcatcagaacaaccacggcggcgaccagactttgcttccagccaaactggtagaaaatcgccaccagcgggaacagtgcaaaagcagaaaccaccggcgagcttaattccccgaggctacctaatacatccaccggcagcgcggtcagcagctggtttactggcaacaggcaagtaaggatcaacacgccccagatagcgccaagaccaaacgccatcaggctgtttatcgccagtacgccgaggatatcggtaggaagaaagagtaaccatgcgttgagcagcccggttttcagggtaaaagagatccccaccgaggccacaaaaccaatgctcagaccaaaagcgatactccccgcctcgcgacggttcatatagccttcaatcagttgcggcaggatcgggcggatgccgtcatgaaaaacagccgccgagcgatgcgccagaagcgatgtcatacccgtcaggcacgccaccacgataatctgaatatacagatccatagtcgtgccttttatttcagatggttaatcagcatcggaatcgcgtgttcgacgtgctcaacggaaaggccaaacgccacttttccttcagcgatcattttggcgatatgctcgtctttcgctttaatgcctggtttggcaatggtgcaacttttgttatagccaatcaccgcgatggcaatcgacaatgccgcgcccgcaccggtattacacgcaccgatgtagtaatccagttgcccggatttcactttcattgccgcttccatgtcgttgtgaatgaaaacttcaaaactgccaggagccgtcgcttcaatggtttttttaatctgctcacgctgtaagcctgcaacgccaatctttttcatgagtctgtccttattggaaaaattgagagggagtttcacgtaacatcacatccacatcggcctgactgaatcctgactggcgcaattgcggaataaaggtggtcaataaatagtcatagccataaccaccattggcttttaaatgggagcggcgcgtaatatccatcgacagcatgacgcggttcagcaacccacggtcacgtagcgcatgaagcatcgcaatacgcttttcgtccgggtagtaactgttcttaccaatggtgtcgaactgcacgtacgcgccgagatcgatcatcttcaaaatgttgtcgaggttgtctttcagatcgcagtgaccaacggtgacgcgcgaaagatcaaccccgtgggcttgtagcaacgccagttgctccagccccatcgtgctgaacgacgtatgcgtggagatcgggcgtccggtctggttatgcgccagcgcagcggcaataaataccttctcttccagcggcgtaatctttccttcgctggtgccgatctccgcgatgatcccggctttcagctccgtgccatcgataccctgttcaatttcatcgaccatctcctgcgccagttcctgcacgctgcgggtcgccacatgttccgggaaaaacgcgtcctggtaataaccggtacaggccaccacgttgatccccgtctcgcgcattacatcaagcataaattgcgcattgcgccccatgtaacggttggtcatctcaatcacattacgcacgccccgggtcatcaggtcgttcatctcctggcaaatgaacgcatactgatcaaggcggcagtccacgttgtttttaaagccggagagatcaatatgcagatgctcatgggccagggtgtaacccgtcggatcaatactcatagggtgtctcctgcaaaccggagggaggaaagaaaagagcgaccattttgtggcggtggcgcacggaaaaattcacacacggtagcccccacatcagaaagcgtggtgcgtacaccgagttgcgtgtggaccagcccttgctgataaaccagcactggcaccacttcacgggtatggtggctgtgaccaatggtcggatcgttaccgtgatccgccatcacgaccaggcaatcatctggctgcatcgcctcaacaagccgggcaaggttacggtcaacgacctgcaaacgttcggcataacgtgcgacgtcttctgcatgaccagcgaggtcggtttcctggatattgatgcaaataaacgccgtcggatgcgtgttaaattcgtcgagggtgatatccataatccgctggctatccaccaggttttgccagctcacgccataaggattgctgacgatatctgccaccttacctaccagcacggttggcacgcccgcctcatacagtttttgcggcacctgcactttttcatcaacaccgtagcccatatgcacgacctggaagccgttgtcataagcgccagaacgcggcgcattaataccaataaagcgcccttctttgctttctgcggcatcgagaatacgctgactgtcggttaacaagccgccaaatgtaatgacccgaccgacctgtacctgctcacgcacgatacgaccaattttgatcgcgtcgtcaaaagagatcacagagagattggcggtaatgttatagacctggcctaaatccgcctcgagattatcgccaatcgcaaccgcctgattgacccacagaaattgcagatcatcgccacggcgctccacctgccagccagcggaaactaatgcctgctcaacacggccaatcacatcgcgaaagggcatccgcagcggcggtaacgggcgcgtgcctaaaatttcctgatgccccataaaggtatcgccaccttcatgttgcagctctgccaccccccaggttgcggaatctgacggttgcatatcacctggtgcataacccaatgcgttgattagccccagcttctccagcgctggtagctgcaaatgcggcaactggctcaggatgtgaccacaggtattcgccccggcatcttgcgggcgcaccagcgtgacatctttcattgcccctacgccaaagctatcaatcactaacaccacaaatcgcgccattacgcccccagagagtttccaagactgtcataacgaccgacgatttctggttcgccacggtgaataccggacaccagcaccacatcgctacgggtgacaaaaatctgcgtgcggaaacagagcaccactgcactgctcaccggatactcgcctgccagcggcagggtgtagtcgatactgctgtcatccacagttttgagattggtttcagtaatcttttgattttctggcgtaaacaccagcgcatgttgcgcatgaccacgacggtagtaaccgccgccgtagcagtagctgtcgccacggaaatgatgggagatttcacttaaccagagcatcgcgatacgttcaggctgatcgccctgctggtttgccggaatagtgcccgtcagcgcatgaccgggttcggcatgagtcacaccgtattgcgccagtaatggcagcgaagtgcagctggtcgctgaaggcgcgttcagttgctcaagtgcaataccagatttcgccagttgatcccgtgcctgtatcagcgtgtgaagattcggtgtcggcaaaacttttccggcagcctcatcccaaagcaggcaagggaaatgggtaagtccggctaaatgcagccccggcagtttcttaatttcagcaaccacctcgtgcagcgaatgctgtacaaaaccgctctcctgccccggataaagaaaatcatcgtcgctataaactttgagcagcacaaactgcacacgtccggccttcaccgccgccgcagaaacttcccgcgctttgtcgagagtaaacacggtgatgacgtcggtgccctgttcaacggcgtcagcaacctgatgacaagggatttgtaccagatgcccctgatgcgccacaggcaaaccagcgcggcgcatgactcgcgcctctttgtaatccaccgccacaatgccgctgtagcctaatgccagcaatttttccgccagccacggattacgaccaaactgcttggtcatcagatacagttcaatgccgtaaagccgcgccgtctcaatcagccgcttaccgttttccagtatctgatccacgtcgatcacccagctgtccggggcgatcttgccctgctgccacaggcttagtgcggcggaaatcagcgccgggttctggcgtttcaatgcttctacaaacatcttgttgcctcgtttctgttccttgaattaaatattcatttttttgaatatttaggttgtgcgacgtggatttgtcgggagcttcaaacctcttcgttagcagccatccataatccataaaggttggccagcaaatagccttcttcacacgggttaacttccagtgcgaattccttcaacaacacctgatgcaattacacaacggcttgccagtggctggattgcgccagttctgccagcaactcgttatccagcggctctatttcttcaccacggcgactgcgcatcagtgcactcgccatatgtgtcatcgccatcgttccttgctcactgcgcaccggcagatggcactctgtttccagtacgttgacgacctgcatcatgcctttgcagatgtccttatcaataacgcctgcctcgcaaagcaggttgagtctggtttccatatcagatgcctttcgtttaataactcggttcctgttccccactcactacccgttgttgatgggcgagcagggcgtgtttatctacaacggcacgcagcagttgttgcattgggtaatcatcgactcgcgtcaggaccacggcttcggtggcctgtaaaaatcgcggatcgtctgtgagcggcgtcgcctctaatcccagcatggtcagttcgttttccgccaccacgttccagatcaccgcatcgacatcgcctttaacaatgcgttgtaaactctcgtgataagagagatcgactcgttccacatcactaccgccaaaaaaaacatcggtcatgattttctgatccgccgaacggttatccagccccacgcgcttcacgtttgcggactcgcctttacggcaaatcaactggtgctcgccaacgtaggtgtgcggccccaactccagcgcgaggcataagcctttttgcgtgagataactttccgccgctagtcgcgaaaccaccgccatgtcatacacgccattaagcagacactccacgcgaatatccgcgccacgcatgtgcgcatagtaaaaaggaatgccatcaaactgggctttcaatccgctcgccaggccttcgtacaaacgggtatagggcaagggcattgcacataccacgttgttgatatccacatgagtcagcaatgctttgttatccatctcgaccagataactgccattgcgcccacggcgttcaatccgtatcgctccgcttgattccagcgttttcaacgcggcctgcgtcaggccaacggatgaacggcattcatttgccagctcatctatggttttcaatcgattaccgcacttttcacccaacaaataacgggccagcgtcgtgatgacgacgccttcttttttgataaacgttcgacgcataataaattttcagtaaattgaatatttatatcttcaggaatttgaagataaggcgcaacagcgagatgtggaaacggcgaggcacttcacattttttcggattattgcaaatgaggataaaaaaaccgggtttccccggtttcagagtgatgataaaagcaaaattgcctgatgcgctacgcttatcaggcctacatttccttgcaatatgtgcattactttgtaggccggataaggcgttcacgccgcatccggcatgaacaaagcgcaatttgccagcaatagtgaattacggcttcgccacaaaaccaatcgcttcgtacaccgcttttagcgtacgggaagcgtgcgcgctggctttttccgcgccatctttcatcacctgttgcaggaaggcttcatcgttgcggaaacggtgatagcgttcctgcaattcagtcagcataccggaaacggcatcagccacttcacctttcagatgaccatacatcttgccttcgaactgtttttccagttctgggatgctctggcccgttaccgctgaaaggatatccaacaggttggaaacgcccgctttgttctgcacatcgtagcgaactaccggcggctcgtcggagtcagtgaccgcacgtttgattttcttcactaccgatttcggatcttccagcaggccgataacgttattgcgattatcgtcagacttggacatcttcttggtcggctccagcagcgacattacgcgcgcgccagatttcggaataaacggctccggcaccttaaagatctcgccatacagcgcgttgaaacgctgggcaatatcgcggctcagttcgaggtgctgtttctggtcttcacccaccggtaccagattagtttgatacagcaggatgtccgctgccatcagcaccggatagtcaaacagaccagcgttgatgttctcggcataacgcgcagatttatctttaaactgcgtcatgcgactcagttcgccgaagtaggtatagcagttcagtgcccagcctaactgtgcatgttccggcacgtgggactgaacaaaaatggtgcttttctcaggatcgataccacaagccagatacaaggccagcgtatccagcgtcgctttacgcagcttctgtgcatcctggcgcacggtgatcgcgtgttggtcaacgatacagtaaatgcaatggtagtcatcctgcatgtttacccactgacgcagcgcacccatgtagttaccaatggtcaattcacctgagggctgtgcgccactaaaaacgatgggcttagtcatttttcgattcctgattttcgctatgcggaagccctaatgcgggcagaaggtcatttatagactgataaattacatcaggctggctgagatcgatagcctcgccgtagttatatccgtaggttaagccaactgatgggcaacctgccgcttttgctgcctgaatatcattgcgtgagtcgccaacaaacagcatctgttgtggagcaattcccatccgctcagccaccagtaacagcgggtccggatgcggttttttgttttgcacatcatcaccaccaatcaccacgctgaagtatttggcgatatctaaggcttcgagcagcggcgcgacgaacggcgtcggtttgttggtgaccaggcctagcggcaggcctttagcctgcaacgcgcccaacgtatcggcaacgtgcgggaacaaaaacgtcccctcttcggcaacctcgccatagtagcgatcgaacagtttacgcagaatacgtacctgttcttctgccggaatgtcgtcatcaacgggcggtttacccattgttttacgcagagtcgcacgttcctgacgcgcccaggtcaatgcgcgctccatcagaacatctgcgccgttaccaatccaggtaataacgcgttcttcacctgcgacgggcaactccagcgcatacagcgccatatctaccgcagcagcaagaccgggagcactgtccaccagcgtaccgtcgagatcaaaagcgacgccgcgaatatcttcaaacttactcatgacttacctttgccagttcactgcgcatttcatcaatgacttttttgtagtctggctggtcgaagattgccgaaccggcgacgaacatatccgcgcccgccgcagcgatttcgccaatgttgttcaccttcacgccaccgtccacttccagtcgaatgtcgaagccagactcgtcgatacgacgacgtacttcgcgcagtttatccagtgtttgaggaatgaaagactgaccgccgaaaccagggttgacggacatcagcaggatcacatccagcttatccatcacgtaatccagatagctcagaggtgtcgccgggttaaataccagacccgctttacagccattttctttaatcagttgcagcgtgcggtcaacatgctcggaggcttctggatgaaaggtaatgatgctggcaccagcggcagcgaaatcaggcacaatgcgatcgacaggtttcaccatcaggtgtacgtcgataggggcggtaatgccatagttacgcaaggatttcagcaccattggcccaatcgtcagattgggaacatagtggttatccatgacgtcaaaatgcacgacatcagcgccagctgccagggcttttgcggtatcttcacccaggcgggcaaaatcagccgacagaattgagggggcaatcaaatactgtttcatccgcttctccttgagaattattttttcgcgggtgaaacgactcctggtttgtacaaagccagcagttcgtccacctttttacgtgtgccgccgttgctgcttatactgcgtcgaactttgacgacatgcaattttgcgcgctgataccactcacgcgttaacatcgtatcgtgattggagatcagcactggaatatggcgatcaaccagaccttcggcgatctccgccagatgcgcttgttgttcaagcgtaaaactgtttgtgtgatacgccgtaaagttggcggtcgcagacagcggtgcataaggcggatcgcaatagacgacagatgcatcatctgcgcgcgccatgctatcagcgtaagactcacaatagaaaaaggcattctgcgctttttcagcgaagtgatacaactctgcttccgggaaatagggttttttgtagcggccaaacggcacattaaactcaccgcgcagattgtaacgacacaggccgttgtaaccgtagcggttcaaatataaaaacagtaccgcccgacggaacggatcctggcttttgttgaactcttcgcggaactgatagtaaacctcggcgcaatttgtttcgggaacaaacagctcgcgtgcggcctgtacgtactcatcagtacgcatcttcacaatgttatagagactgatcaggtcgctattgatatcggcaaggatataacgagaaaagtcggtgttgagaaacaccgacccggcacctacaaaaggctcaaccagacattcgcccttgggcaaatgccgtttaatatcatcaagcaggggatacttgccccctgcccacttcaaaaaagcgcgatttttcttcatgctgactaactaattacaccttctccggctgtggagaaagctccgacagcatccagcgcttcaggcagctcccgcaacgataaaccattgcgggagataaccttgattacttcagatcggcctgtacctgacgcagcggtttcgcccacgggtttttggcctgaacatctgctggcaatgtagataccgcttttttcgcctcttctttcgaagcgtacacgccagaaaccaggacataccacggctgaccattacgcgtcgtttcatagacaacgtagtttttcagattctctttcttcgcccaaccgttcaggttgtcgtagttagaggaactgctcagctgcagagtgtaatggctggacggtgccgatttcaacgaaccaacattacctgcggtcttccctccagcggctggtgttgccgtggtttgcgccggggatgccgtctgtactggagccgtagtcgccgtctcttttggtgctggcgtagaagtcgcagccggtgccttcgtgctcgccacaggggcagctggttcagtacgcttcggcgtctgtgctaccggcttcggctccgttttcacggttgcttgcggttttttcggttcaatcaccgcctgctgacgagctgggcgcgtagtggccggacgttcagcggtttgcgttttcgccgtgtcacgcgatgcattgccattgcgaacaggcgcgacagtcgcgggttcggtcggcaatgtggaattgaccgccacattgttcaactgttgctgattttgtggctgggtcagcgcattgttcaggtcaccctgcacttcaacacgttgttgaccatccgttgccgccggggtttgcccttgagtcggcgtagaagagatcggtggcagagaaacatcctgctgagtattttccgcagacgtggttcccggcgctggctgcaccccattcgcctgatcggtcgcattgcctgcaagatcaatactcttctcgccagacgcggtttgatcgctggaagaggtcgagggggcttttagcgcagaaccgataccgatgatcaacagcagtagaaccagaatgccgacgcccatcatcatatactgacgagaagcgggtttactggctgcttttttgcgcttacgcggacgacgctctacgcgctcttcatccacggtttcatcttcggattcgtcaatttcttcttcgatttccggttcctcattgcgctctttttgcgcacgagtcggacggcgatcgtcagtgtcatcaagttcaatatcatcaaaattgatctgcggttcgccacgttcagtacgctcagaacgttcagaagattgacgagaacgaccagtacgacgatcgctgggatcgggtttcagctcgtcttctggtttgaattcatccatttaacaccccactaaaaggttaatgcttaccacgttgcaattaacctgaagctaatagaccgcttgataagcggcctgacctttcttgttgttacgctgattgacaatcggcaatggcgttaagaacaagctcgtgcgaaacgccgctgcgaacttcactcttaccaattgccaacggaagaattaagcgcatctctcccgcaaggactttcttgtcacgcagcatatgcggtaaatacgcctgcgcggacatttcgcgcggcccattgaccggtaacccagcccgcttgagcagggttataatacgctgcgtttcggcagaactaaactgcccgagacgttccgacgtccgcgccgccatcaccatacccgcagcgaccgcttcaccatgtaaccaattgccataccccatttcagcttcaatggcatgaccaaaggtgtgtcccagattcagtaaagcacgtaacccggtttcgcgctcgtcggcggcgacaacttctgccttcagttcacaacaacggcgaatacagtacgccattgccggaccgtccagacgcaacaacgcatccagattctcttccagccagttaaaaaacgcaccgtcaagaataatgccgtatttgatgacttctgccagccccgacgctaactcacgcgggggaagcgttttcagacagtcgagatccaccaccactgaagcaggttggtagaacgcgccaatcatgtttttaccgaggggatggttgaccgcagttttgccgccaacggaggaatcgacctgcgacagtaacgtcgtcgggacttgaatgaaacggacaccgcgctgataactcgccgccgcgaagccggtcagatcgcccactacgccgccgccaagcgccaccagcgtagtatcgcgaccatgcggtttttgtaacaacgccgtaaagacggtatcgagtacagccaggcttttatactgctcgccgtcagggaggataacgctatcgacgttaacacccgcctgttcaagtacgccgcggaccttatcgagatacagaggagccagggtttcgttggtgaccaacatgacctgctcgcccgatttcagcggtaagaatgaagctggttcattaaacaaaccagatgcgatggtaattgggtaactacgttccccgagagtaacgacaatcctctccataacgcgacatccaccttaattactgtacccgcagacgagtgtatataaagccagaattagttgctttccagcatgtgaataatctggtttgcaaccactttagcgctttgatcatcagtacgaatggtcacgtcggcaatctcttcatacagcggattgcgttcattggccaacgcttccagaacttcacgcggcggtgtttcaacgtgcagcaacgggcgttttttatcacgctgcgtgcgtgcaagttgcttttcgatggtcgtttcaagataaacgacaacgccacgagcggaaagacggttacgcgtttcacgggatttcacagagccgccgccagtagccagcacaataccctgtttctcggtcaactcattgatgaccttttcttcgcgatcgcggaagccttcttcgccttctaaatcgaaaacccagcccacatcagctccggttcgtttctcaatctcttgatcggaatcgtaaaattccatattgagttgttgagctaactggcgcccaatagtgctttttccggcacccataggcccaaccagaaagatattgcgtttctctgccattttttcggtactactaagactattcgttaatgataaacccgcttcgctcagagagcgccgcaggacatgaactgaaacctcataagatattgcgagagtcagactgaaaattatctcaatactccagcgggtttggcaactgaataaatcacccatccctctgcatatctggtcgctgcaagcgcgctgccttgctaccaccgctctggcgataaatcaccgggtaagattagcgtaaaaaagacagcaaaatgccgcctgaatgataaatcatcatcatggaacgcaggcagcgaagagcaccaactctcaaatcggtactccttgtatgctaaatacctgcgcgcgtcaaatagatgaaacacgttcagcgtaaaaacattaccgcttttacggctgtttactcactggaaaccagtcgtggcgtgataaacaccactaactcgcgtcgttcatcttcttttccgtcatgacgaaataattgcccgaaccagggaatgtcgccaagcaacggtacgctatcctgacccgatttatttttacgggtaaaaatgccgcccagcgccaacgtttctccgcttttgacctcgacctgcgtttcgatctcctgcttatcaatcgccagcacttcgccatcggcctgctgtagcacctgccccggaacgttctggctgatgtgtaatttcagccggatgcgacctttttgtaacaccgtgggcgtgacctccatccccaggacggcctctttaaattccaccgacgtcgcgccactttccccgctggaaacctgatatggaatttcgctcccctgtttaatgctggcaggctgaagatgtgaggccagcagacgcggactggcgataatatccagctgctgtttttgttcgagcgcggaaagctcaagatccagcaagcgtccgttgatgcgcccaatgttaaaaccgacatgcgttgtcgccgtcgctacggagaggtcgctaccaagcgtggtgacttgcccaacgccaccagcgtgttgcgcatcggccagcgtccatttcacgcctaactcacgcaaacttttttcattaatggtgacaatatgcgccgacagctcaacctgcccgaccggcagatccatttgcgctacccactgttcaagcgcgcttaacgccgttttgttatctcgtagcaaaaggcgattggtgcgtttatcgacggtcatactccctttggcactcagtagcttctcccccgctttcgccagttctcccgcgtcggcgtattgcagggttatactgcgattttccagcggcagatttgcctgcgcccgcgcctgctccgcctcctggcgggcgatattgttattctgccaggcaatggaatgcactgagagaatgttgccttcctgccgcgttatcagtccggcgcttttcactacagtttgtagtgcctgcttccagggaacatctgttagatgtaacgacaccgtaccgctgacgtctggcgacacgaccaggttcaacttctcctgttcagccagcgcctgcaacacctgagctaccggaacgtcatccaccatcagcgtcactttttgcggctttgccgcctgtacgccgggtatcagcatcaacagtagtgcggctatccattgcttcatttgtatctccttgccgttgccacaaccattgtggcggttcgcagtttgtcccggtacccagcgttagtacgtctggcgtcagctgtaaaattgtccagccgttttccagcacatcgttttgctgcacccgtcgccatttcttttgcccgtcttttattacaccgatgatgcgctcgcctcgccctaccatcccctgatagcgccactggctaagttcgctaatccggcatagatcttccggcggtttaaaagggtcacgcataccggttaaaaggcacaatgcaatacctgccaacaaccagcgtttaaccctcatgcggcgtctccagttgtagcgtgaacaaaagatcatcaccttccacgcttaacgaaaaacggctcacgctgacgttgcgctctgccagccgtgtaaatgccgacggcactgcttcccacagcgttttcaacgccaactcgcctccctgcgcggatggatgccaggaaaccagttgcgcgccggataactgaaaatccagtggcgaaaagggcagcgttttttcctcgctgaagggagtggtgtctaccaggcgatacagtgcggcccactgctggtgatgacttgcccgtagtcgaattaatgcgtcgcgctcttcatggtgtgtcgatgacagaaaaatgagcgtaactaacatcagcaaccagaatgcccagcaaagctggcggaggcggggtgatgtggcgaaccaccagtcaaagaacatgttcatcgctaaccttccttgttaactgatactcaaattgccagcgtccctgcgcatcctgctgcgtggctccccgctgattgagatgaaaagatgcatcctggcggagtgacgtttctagtgcgtttaacgcggtaatgcttgttgtcagccccttgatctccagcgttccctgctgccagcttatcgttgtcagccaggcgtgctcgggtaaaagcgccgccagtgcttccagcgcagattgccagtcgcgggtaaattgtcgctggcgctgccgttgcgaacgctgttcgcgtaactgctgttgctccagcaaacgtggcttcgttatctgtaagctgcgggcgagttgttgttccgcctgaagcaaaactgcgtctatgcgcgcttcggcgctgcctgtcagacgcagtattagcgttatcccgacggccagcagcagaggcgcaacgaacatcagcaaccagaaacgcagaaaagcggtccggcgttgctgtcgccagggcaaaaaattaattggcgggttcatcagtacgccttcccaagcgccagccccagcgcgatggcaaagtctccacctggcggcggtagcggcggctgacgaacagaaacggcctcccagggatcaaatccgccttcgccacatatcgcgacgctttcgggatcaacggataacgctgccgccagctccttcgcgctagtcatccccaccgccagtttgcgcccccagctatagcgcgtcgcccacagccactgttcgttatcacgccaggccagacattgctgatgagaaggtaaaaaaggcaggaatcgctgtaatgcactggcatccggggtgatcgcgctcacatgaacacgcaacctttctgccagagtaagcagcgttgccagctctttgctttgcgcggcagtcacgttataggcgggactgagtgagtcttcgctgtaatcgaagcgcagggagtccggatccatatccagctcgcgggccatcgtccctgacagccaggccgtttgctcccgctcaccaagggacatcgacgggcgcggaaatgaccgctgtaatgtgcgactggcgggaaacgccaacataatgtgatgacgctgcggcagttcgcgactccacggtaacaacgttttagccagctgctgcgcatcaacaatccgcccatctttgataatgtcgttctccagcggcaaccgccaccagcgttgcaaaaagcattcttttgcgccccgcacgatcgcaaccgctaccgcttcttgctgttgtaaatgcaaaccaatttgccagatcttaaatgccattgtgatgatctccttatcacccgtcactctgacgggtatatcaatgcgtctggcttgcctttatactaccgcgcgtttgtttataaactgcccaaatgaaactaaatgggaaatttccagtgaagttcgtaaagtattttttgatccttgcagtctgttgcattctgctgggagcaggctcgatttatggcctataccgctacatcgagccacaactgccggatgtggcgacattaaaagatgttcgcctgcaaattccgatgcagatttacagcgccgatggcgagctgattgctcaatacggtgagaaacgtcgtattccggttacgttggatcaaatcccaccggagatggtgaaagcctttatcgcgacagaagacagccgcttctacgagcatcacggcgttgacccggtggggatcttccgtgcagcaagcgtggcgctgttctccggtcacgcgtcacaaggggcaagtaccattacccagcagctggcgagaaacttcttcctcagtccagaacgcacgctgatgcgtaagattaaggaagtcttcctcgcgattcgcattgaacagctgctgacgaaagacgagatcctcgagctttatctgaacaagatttaccttggttaccgcgcctatggtgtcggtgctgcggcacaagtctatttcggaaaaacggtcgaccaactgacgctgaacgaaatggcggtgatagccgggctgccgaaagcgccttccaccttcaacccgctctactcgatggatcgtgccgtcgcgcggcgtaacgtcgtgctgtcgcggatgctggatgaagggtatatcacccaacaacagttcgatcagacacgcactgaggcgattaacgctaactatcacgcgccggagattgctttctctgcgccgtacctgagcgaaatggtgcgccaggagatgtataaccgttatggcgaaagtgcctatgaagacggttatcgcatttacaccaccatcacccgcaaagtgcagcaggccgcgcagcaggcggtacgtaataacgtgctggactacgacatgcgccacggctatcgcggcccggcaaatgtgctgtggaaagtgggcgagtcggcgtgggataacaacaagattaccgatacgctgaaggcgctgccaacctatggtccgctgctgcctgccgcagtcaccagcgccaatcctcagcaagcgacggcgatgctggcggacgggtcgaccgtcgcattgagtatggaaggcgttcgctgggcgcgtccttaccgttcggatactcagcaaggaccgacgccgcgtaaagtgaccgatgttctgcaaacgggtcagcaaatctgggttcgtcaggttggcgatgcatggtggctggcacaagtgccggaagtgaactcggcgctggtgtcgatcaatccgcaaaacggtgccgttatggcgctggtcggtggctttgatttcaatcagagcaagtttaaccgcgccacccaggcactgcgtcaggtgggttccaacatcaaaccgttcctctacaccgcggcgatggataaaggtctgacgctggcaagtatgttgaacgatgtgccaatttctcgctgggatgcaagtgccggttctgactggcagccgaagaactcaccaccgcagtatgctggtccaattcgcttacgtcaggggctgggtcagtcgaaaaacgtggtgatggtacgcgcaatgcgggcgatgggcgtcgactacgctgcagaatatctgcaacgcttcggcttcccggcacaaaacattgtccacaccgaatcgctggcgctgggttcagcgtccttcaccccaatgcaggtggcgcgcggctacgcggtcatggcgaacggcggcttcctggtggacccgtggtttatcagcaaaattgaaaacgatcagggcggcgtgattttcgaagcgaaaccgaaagtagcctgcccggaatgcgatattccggtgatttacggtgatacgcagaaatcgaacgtgctggaaaataacgatgttgaagatgtcgctatctcccgcgagcagcagaatgtttctgtaccaatgccgcagctggagcaggcaaatcaggcgttagtggcgaagactggcgcgcaggagtacgcaccgcacgtcatcaacactccgctggcattcctgattaagagtgctttgaacaccaatatctttggtgagccaggctggcagggtactggctggcgtgcaggtcgtgatttgcagcgtcgcgatatcggcgggaaaaccgggaccactaacagttcgaaagatgcgtggttctcgggttacggtccgggcgttgtgacctcggtctggattggctttgatgatcaccgtcgtaatctcggtcatacaacggcttccggagcgattaaagatcagatctcaggttacgaaggcggtgccaagagtgcccagcctgcatgggacgcttatatgaaagccgttcttgaaggtgtgccggagcagccgctgacgccgccaccgggtattgtgacggtgaatatcgatcgcagcaccgggcagttagctaatggtggcaacagccgcgaagagtatttcatcgaaggtacgcagccgacacaacaggcagtgcacgaggtgggaacgaccattatcgataatggcgaggcacatgaattgttctgattaaaaaggcgcttcggcgccttttcagtttgctgacaaagtgcacttgtttatgccggatacggcgtgaacgcgttatccggctaacaaaatcgtgaaaactcaataaattgcagaaaccccataagcctgataaacattgtgcatcaggcaaacttcacgcatttacactcgcccctgccctttcaaccattcgcgcacgaggaacagcgcactgacattgcgcgcttcattgaagtcagggtcttccagcaaatccatcatatgcgccagcggccagcgcacctgtggtagcggctctggctcatcgccttccagtgattccgggtagagatcttgcgctaccacgatattcattttgctggaaaagtaagacggtgccatgctgagcttcttcaaaaaagtcagatcgttcgctccaaatccaacctcttcttttagctcgcggttagcggcttcgtagacgctttcacccggatcaattaatcctttcgaaaaacctaattcgtaggattcagttcccactgcgtattcgcggatcaggatcaggtgatcgtccacaatcggcacaatcatcactgcttcccggttggttggacgcattcgttcataaacacgccgcacgccattgctgaactccagatccacgctctcgacggtaaacagtcgggaacgggctacagtttcaacattcagaatggtgggtttttgtaatgatttgctcatcgtgggatctatgctgtgaaatcagcggttattgtgcgatatcggacacgctttcggcaatgtgaattgcatgttatttacatttatgtaacttaataaataatcgtcctcaaatcaaattaaaagtcaataggttgaaataactccaggaatttgctgatattccgccttcagagggtttgctatgatcagcggttactgtgatgtgcttaatgatgctcaagttaaactccacgcttgccgatagccaaccgcagaatcatgtattgtgtccggtgcgactgaccacgcctgacagactaagtaagatggggaaagcatgagcaccattgtgatttttttagctgctttgctggcctgctcactacttgcgggatggctgataaaagtgcgatccagacggcgtcagctgccctggaccaacgccttcgcggatgcgcaaacgcgtaaactcacacctgaagaacgtagcgccgttgaaaattatcttgagagcctgacgcaggtattacaggtgcctggcccaacgggagccagcgcggcaccgatctctctggcgctgaatgccgaaagcaacaacgtcatgatgctgacacacgctatcacgcgttacggcatctctaccgacgatccgaataaatggcgttactacctcgattcggtagaagtccacctgccccctttctgggaacagtacatcaacgatgagaataccgttgaactgattcataccgattcgctgccgctggttatttcactcaacggtcatacgctgcaggagtacatgcaggaaactcgcagctatgccttgcaacctgttccgtcaacgcaggcgtcgattcgcggggaagagagtgagcaaatcgagctactcaatattcgcaaagaaacgcatgaagaatatgcgctgagtcgtccgcgcgggctgcgtgaagcgttgctgatcgtcgcctccttcctgatgttctttttctgcctgattaccccggatgtatttgttccgtggctggcaggcggcgcgttactgctgctgggcgcaggtctgtgggggctattcgcgcccccggcaaaatcctccctgcgggaaattcattgtctgcgcggtacaccccgtcgttggggattgtttggcgaaaacgatcaggaacagatcaacaatatttcactcggtattatcgacctggtctatcccgcacactggcagccatacattgctcaggatctcggtcaacaaaccgatatcgatatctatctcgaccgccatgtagtgcgtcagggacgatatctttcgctgcatgatgaagtaaaaaactttccgttacagcactggctgcgcagtacgattatcgctgcgggctcgctgctggtgctgtttatgctgttattctggatcccgctggatatgccgctgaaattcactctctcatggatgaaaggcgcgcagaccattgaagccaccagcgtaaaacaactggctgacgctggcgtgcgggtaggcgatacattgcgtattagcggtacgggaatgtgtaatattcgaacttccggaacctggagcgcgaaaaccaattcaccttttttaccgtttgactgctcgcagatcatctggaacgacgcccgctcattgccattaccagaatctgaactggtcaacaaagcgacggcattgactgaagcagttaatcgccagctgcaccctaaaccggaagatgaatctcgcgtcagtgcctcattacgttcagcaattcaaaaatccggcatggtattgcttgatgattttggcgacattgtactgaagacagcggatttatgttctgccaaagatgactgtgtgcgactgaaaaatgcgctggtcaatctcggcaacagtaaagactgggacgcgctggtaaaacgcgccaacgccgggaagctcgatggcgtgaatgtgttattacgcccggtgagtgcggaatcgctggataacctggtggcaacctccaccgcgccgtttatcacgcatgaaacggcgcgagcggcacaatcactaaacagtccggcccccggcggattcctgattgtcagcgacgaaggcagcgattttgttgatcagccctggccttcggcatcactttacgactacccgccgcaagaacagtggaacgctttccagaaactggcacaaatgctgatgcatacgccgtttaacgccgagggtatcgtcacaaaaatcttcactgacgccaatggtacgcagcatattggccttcatccgatcccggatcgttccggcctgtggcgctatctcagcaccacattgctgctactgacgatgctgggtagcgccatttacaatggcgtacaggcctggcgtcgttaccagcgtcatcgcactcgcatgatggagattcaggcctattatgaaagctgcctgaacccgcaactgatcaccccttcagaaagccttatcgaataacacgtttgcgcggcaggttatgctaccctgtcgcgcaaattgcttcactctggagatttccctcatgcatatcaacattgcctggcaggacgtagataccgttctgctggatatggacggcacgttgctcgacctcgccttcgataactatttctggcaaaagctggtgcctgaaacatggggcgcgaaaaacggggttacgccacaggaagcgatggaatatatgcgccagcaatatcacgacgtacagcatacgctaaactggtactgtcttgattactggagtgagcaactgggtctggatatctgtgcgatgaccaccgagatgggaccgcgtgccgtactgcgtgaagataccattccgtttcttgaggcactgaaagccagcggtaagcagcgaattttgctcaccaatgcgcatccgcacaacctggcggtaaaacttgagcataccggtctggacgcacaccttgatttattactttccacccacacatttggttatccgaaagaggatcagcggttatggcatgcggtggccgaagctacgggtctgaaagctgaaagaacgctgtttattgatgacagcgaagcgattctcgatgctgccgcgcaatttggtattcgttactgcctcggcgtgactaatcctgattccgggattgccgagaaacagtatcaacgccatccgtcactgaatgactaccgccgcctgatcccctcgctaatgtgaaggagacgccatgaaagagaaacctgctgttgaggttcgactggataaatggctatgggctgcccgtttttataaaacccgcgcgctggcccgtgaaatgattgaaggcggtaaggtgcattacaacgggcagcgcagcaagccgagcaaaatcgtcgagctgaatgccacgctcactctgcgccagggaaatgacgaacgcacggtgattgtaaaggcgattactgaacagcgtcgccccgccagcgaggcagccttgctgtatgaagagactgcggaaagtgtagagaaacgcgaaaaaatggcgctggcacgtaaacttaatgccttaaccatgccgcacccggaccgacgcccggacaaaaaagagcgccgcgacctgttacgatttaaacacggcgacagtgaataactgtcacctgcaagagagatgattatgccgcaacatgaccaattacatcgctatctgtttgaaaactttgccgtgcgcggcgaactggtaaccgtttcggaaaccctgcaacagatccttgagaaccacgattatccgcagcccgttaaaaacgtgctggcagaactgctggttgcgaccagcctgttaaccgctacgctgaagtttgatggtgatatcaccgtacagctgcagggcgacggtccgatgaatctggcggttattaacggtaacaataaccagcagatgcgcggtgtggcgcgcgtgcagggcgaaattccagaaaatgccgacctgaaaacgctggtcggcaatggttacgtggtgatcaccattaccccgagcgaaggcgaacgctatcagggcgtagttggtctggaaggtgataccctagcggcctgcctggaagattactttatgcgttctgaacagctgccgacgcgcctgtttattcgcaccggcgacgtagacggcaaaccggctgcaggcggtatgttgttgcaggtaatgcctgcgcaaaatgcccagcaggacgactttgaccacctggcgacgctaaccgaaaccatcaaaaccgaagaactgctgaccttaccggcaaacgaagtgttgtggcgtttgtatcacgaagaagaggtgacggtttacgatccgcaggatgtggagttcaaatgcacctgctcgcgtgaacgttgcgccgatgcgctgaaaacgctgcctgatgaagaagttgatagcatcctggcggaagatggcgaaattgacatgcattgtgattactgcggtaaccactatctgttcaatgcgatggatattgctgaaatccgcaacaacgcgtctccggcagatccgcaagttcattaatgagtatgtccggcagagagggctctgccggattttacgactaatacacctgatgcgctttgtcactcattcagattcacattcagcctttcaccatccactacaagatcgcgccacgctttaggcttcgtccccagttttccatccttcgcagctgtgagtaatttttctttcgttatttcgttcggaagtaaactcatatcaagcgcgtcccattcttttctgtctgagtcaaagccatagacaatgactctgtcatcattaaaagcaaacaggatccgctccgcctgaccatcactattcagatcttgctcgaccaggacgcaggcgtctttttcaatacaggtcatcacgttatagcgatcctggattaaggccgaccagaatgtcgcatcaggtttaacagaaccaggggcaattaacacattatcggctaatactttttccgatacctgttgctgaagatgttgctctccatctaacgccatcagcagatcccgcgcgcgtttcgggtctttcataaacccggcatcgcttttcagcgactcaagcgcagcacgtccatagcgaccgctctgctcgagcatgtagatagttacctggtctgacgtgtttttgccgctctgataacgcgccatatggctgttcacgctaatgcgcatactgtccagcaccggcgaattaagaagcaccagtatcaccaacaccaataacgaaaccgcaaggttcactttgccctgaagaacaacgggattttgccctttacgccagacgatgctgacaaaataccccagcgaccacaccagtaacaccagcaccgccagcacgccctgcaagcggtcgacagtccagccgtactgagcgacccgcagccataacgcccaggcggcgacgaacacatacagcggagcaaccagcaaagcggttttaatcaggcaacgcaacggccctgtccagggaagtgacgctttttgcggatcgcggacaatagccattaagatcaattgcaaaaaggccagcgtcaacagcaacccggcggcggagatgtggcgagaaatcgcgctcaggcccgtaaacggcagggtgatgataaacatcagggttagcaatgatactaacggcagcaaccccgtggcgattaacgtgaacaacttttgaatagagtcgattaaacgtgactgtgttcgcgcgaggatcaccgccagcgcggtaaccagacctaacgtgagataaataaaccagtcggttgcaaaaaagagcgtattgaaaaacgtgatgccaacaagtttaaacaactcactccacagtaaaagcaccagccacgtcaagccattggcgagaaaaatcaccagtaatataagtacgttatgccatactgactggtaaaaatagcgatagcggctactgtcattgcggatgcgaaggctttgttgtatccacggtagcaacaacattgccatcaacagcagatagcaaccaaaatcccaaagcgccttttcagctctccaggggttcatgccatcagtttgccacttcagccagccgctcatccccagcgtggcaataaacactagcgccagccatccccaaaggcgcttctgtttaaaagagatcacggagaagagtaaaacggatgaaaacgcgacggtcgcaggcacgccataaacaatccaactgtgattttttccggaaagccaggcgatcagcaggtagcaaaccagaccctgaagtaatccggtagcaatcatcccccagcgtgttgcgggtgaaagttcaacgttatccatgttggttatccagaatcaaaaggtgggttaattatcgcatccgggcagtagtattttgcttttttcagaaaataatcaaaaaaagttagcgtggtgaatcgatactttaccggttgaatttgcatcaatttcattcaggaatgcgattccactcacaatattcccgccatataaaccaagatttaaccttttgagaacattttccacacctaaaatgctatttctgcgataatagcaaccgtttcgtgacaggaatcacggagttttttgtcaaatatgaatttctccagatacgtaaatctatgagccttgtcgcggttaacacccccaaaaagactttactattcaggcaatacatattggctaaggagcagtgaaatgcgcgttaacaatggtttgaccccgcaagaactcgaggcttatggtatcagtgacgtacatgatatcgtttacaacccaagctacgacctgctgtatcaggaagagctcgatccgagcctgacaggttatgagcgcggggtgttaactaatctgggtgccgttgccgtcgataccgggatcttcaccggtcgttcaccaaaagataagtatatcgtccgtgacgataccactcgcgatactttctggtgggcagacaaaggcaaaggtaagaacgacaacaaacctctctctccggaaacctggcagcatctgaaaggcctggtgaccaggcagctttccggcaaacgtctgttcgttgtcgacgctttctgtggtgcgaacccggatactcgtctttccgtccgtttcatcaccgaagtggcctggcaggcgcattttgtcaaaaacatgtttattcgcccgagcgatgaagaactggcaggtttcaaaccagactttatcgttatgaacggcgcgaagtgcactaacccgcagtggaaagaacagggtctcaactccgaaaacttcgtggcgtttaacctgaccgagcgcatgcagctgattggcggcacctggtacggcggcgaaatgaagaaagggatgttctcgatgatgaactacctgctgccgctgaaaggtatcgcttctatgcactgctccgccaacgttggtgagaaaggcgatgttgcggtgttcttcggcctttccggcaccggtaaaaccaccctttccaccgacccgaaacgtcgcctgattggcgatgacgaacacggctgggacgatgacggcgtgtttaacttcgaaggcggctgctacgcaaaaactatcaagctgtcgaaagaagcggaacctgaaatctacaacgctatccgtcgtgatgcgttgctggaaaacgtcaccgtgcgtgaagatggcactatcgactttgatgatggttcaaaaaccgagaacacccgcgtttcttatccgatctatcacatcgataacattgttaagccggtttccaaagcgggccacgcgactaaggttatcttcctgactgctgatgctttcggcgtgttgccgccggtttctcgcctgactgccgatcaaacccagtatcacttcctctctggcttcaccgccaaactggccggtactgagcgtggcatcaccgaaccgacgccaaccttctccgcttgcttcggcgcggcattcctgtcgctgcacccgactcagtacgcagaagtgctggtgaaacgtatgcaggcggcgggcgcgcaggcttatctggttaacactggctggaacggcactggcaaacgtatctcgattaaagatacccgcgccattatcgacgccatcctcaacggttcgctggataatgcagaaaccttcactctgccgatgtttaacctggcgatcccaaccgaactgccgggcgtagacacgaagattctcgatccgcgtaacacctacgcttctccggaacagtggcaggaaaaagccgaaaccctggcgaaactgtttatcgacaacttcgataaatacaccgacacccctgcgggtgccgcgctggtagcggctggtccgaaactgtaatgatttgaagctggagaatatctatccagtatcttatagaaagcaaaacgggaggcaccttcgcctcccgtttatttacccttcttttgtcgtgccctgcgcccgcgttaccggcactggcagccaggcgcgaatggaaagcccgccccgctcgctggtgccaagctccagcatcccgttatggttatccacgatacgctgcacaattgccagccctaatcccgtgccgctaatggtgcgcgcactgtcgccgcggacaaacggctggaacaggtgcttacgttgttccggcgcaattcccggaccgtcatcttccacctggaaccaggcgcgattcggctccgttccgctgctgactttgatccagccattgccataacgggcggcgttgaccaccatattcgccaccgcgcgtttgatcgacagcgggtgcattttcacttcaatgctgccggggtaaagcgcggtttcaatttcccgctcatagccactttcggcagcaatcacctcaccgagtactgcattaagatccgccatttccatcggcatctcctgcccggtgcgcaggtagtcgataaactgctcaatgatggcgttgcactcttcgatatctttattgatcgattctgccagatagccatcctgctcgctcatcatctcagtcgccaggcgaatacgcgtcagcggcgtgcgcaagtcgtgacttacccccgccatcagcagcgtgcggtcatccgccagttgcttaacaccagccgccatatggttaaaggcacgggtaacggaacgcacctccgaagcgccatactcacgcagcggcggcggaataatccctttaccaacctgcaaggctgcgtgttcgagatcgaccaacggtcggttctggatacgaataaacagccacgccccgcctatcgccaatagcataatcgccagcgtatagcggaacagcggagagaaatcgccctgatgaatttcggtcagcggcacgcgtacccagatattgggcgacagccaggttttcagccagacgacaggcgaacttttgttgacctcaacgcgcacttccgtcgggccgcccagttgctgcgccatctgatggcttaagaattcatagtgttgcgcccaacgcagacctgcctcttcggcagcctcgttggagtagagagagatccccagctcacggtagatctcccgacggaaagcgggaggcacaaccaactgcgtgccgtcctccagttgcagtttgtcggtcatcaacatacgcacttcgtacgcgaggactttattaaactgctggaggctcggcaaaatcgcgaagttcagcaccaccagataagtcgtcaccaggctggcgaacagcaaggtgacgatgagcaataacgtacgggcaaatgaacttcgtggcgagaagcgcaatcgcctcatgctttagagccgtccggtacaaagacgtagcccagaccccagacggtctgaatgtaacgcggatgcgctggatcttcttccaccatgcggcgcagacgcgaaatctgcacgtcgatggagcgttccattgcggaatattcacgaccacgggcaaggttcatcagcttatcgcgggagagcggctcacgcggatggctgaccagtgccttcagtaccgcaaactcaccgctggtgagcggcatcggctcgtcttcgcggaacatttcgcgcgtaccgaggttaagtttgaacttaccgaaagcaattaccgcctcttcctgtgacggtgcgcctggcagttcgttcgcctgacgacgcagcaccgcacggatacgggccagcagttcacgcgggttaaacggttttggaatgtagtcgtcagcgccaatctccaggcctacgatacggtccacttcttcccctttcgccgtcaccataatgatcggcatcgggttgctctgactacgaagacgtcggcaaatcgacaagccatcttcaccaggtaacattaaatccagtaccataagatggaaagattcacgagtcagcaggcgatccatctgttctgcattagcgacgcttcgaacctggaagccttgttcggtgagataacgttccagcagcgcacgcaggcgcatgtcgtcatcgaccaccagaatcttgtagttctcttgcattgtttgtactcccaaaggttcgcaacaatttgtaagcgtgtattcttaaaaaagctcacgttcgtcaccagctaaatctggtatgaatttcagcctaaattgttacaaagcatattaaacagcagcttaagtatacaatttattcggcgaaacattattgattctgttgatatgatcacgttatacccaatgtgcgcattatcaaacagacaaagggaatcaacgagatgaaaacgcccctggttacccgggaagggtatgaaaaactcaaacaagagcttaattatctctggcgtgaagaacgcccggaggtcacaaaaaaggtgacctgggccgcaagtctgggcgaccgcagcgaaaatgctgactatcagtataataaaaagcgtctgcgtgaaatcgaccgtcgcgtgcgctatctcactaaatgcctggaaaatctcaaaatcgtcgattactcccctcagcaggaaggcaaagtcttttttggcgcgtgggtggagattgaaaacgacgatggcgtgactcaccgtttccgtattgtcggctacgatgaaatttttggccgtaaagattacatctctatcgattccccgatggcccgcgcattgctgaaaaaagaagtcggcgatctggcggtggtgaatacccctgccggggaagcgagctggtatgttaatgctatcgagtacgtgaaaccgtaaggaagagtcttaacctcctgccgatggctggcatttttgccagccagtccgtataactatcccctgatttttgatccgaaaagatgaactcaaaccatgatgaatgattcgttctgccgcattattgcgggtgaaattcaggcgcgcccggaacaggttgacgctgccgttcgcctgcttgacgaagggaataccgtgccgtttatcgcacgttatcgtaaggaaatcaccggcggtctggatgacacgcagctgcgtaatctggaaacgcgtctgagctatctgcgcgagctggaagagagacgtcaggcgatcctcaagtccatttccgagcaaggcaaactcaccgatgatctggcgaaggccatcaacgccaccctaagcaaaaccgaactcgaagacctctacctgccctacaaacctaaacgccgcacccgcgggcaaatcgccattgaagcagggcttgagccgttggctgacctgctgtggagcgatccgtcacacacgccagaagtcgccgctgcacaatatgttgatgccgataaaggcgtggcagataccaaagccgcgctggatggcgcgcgctatatcctgatggaacggtttgccgaagatgccgcgctgctggcgaaagtgcgtgattatctgtggaagaacgcgcatttggtttctacggtggtgagcggtaaagaagaggaaggggcgaaattccgcgactatttcgatcatcacgaaccgttgtccacggtgccttctcaccgcgcgctggcgatgttccgtgggcgtaacgaaggcgtacttcagctttcgctgaatgccgatccacagttcgatgagccgcccaaagagagctattgcgagcaaatcatcatggatcaccttggcctgcgcctgaacaatgccccggcggatagctggcgcaaaggcgtggtgagctggacgtggcgcatcaaggtgctgatgcatctggaaaccgaactgatgggcaccgtgcgcgaacgtgcggaagatgaagcaatcaacgtctttgcccgtaacctgcacgatctgctgatggcggcccctgccggactgcgtgcaacgatgggcctcgatccgggtctgcgtactggggtaaaagtggcggtggtcgatgccactggcaaactggtggcgaccgacaccatttacccgcacaccggacaggccgcaaaagcagcgatgaccgttgctgcgctgtgtgaaaaacataacgttgaactggtagcgatcggtaacggtacagcttcccgcgaaactgagcgtttctatctcgatgtgcagaagcagttcccgaaagtgaccgcgcagaaagtaatcgtcagcgaagcaggcgcgtcggtttactcggcttccgagctggctgcacaggagttcccggatctcgacgtttcgctgcgtggcgcggtgtctatcgcccgccgtttgcaggatccgctggcggagctggtgaaaatcgatccgaaatctatcggcgtaggtcagtatcagcatgacgtcagccagacgcaactggcccgcaaactggacgcagtagtagaagactgcgtaaacgccgttggcgtcgatctcaacactgcttctgttccgctgttaacccgcgtggcgggcctgacgcgcatgatggcgcaaaacatcgttgcctggcgcgatgagaacggtcagttccagaaccgtcagcaactgttaaaagtgagccgtctggggccgaaagccttcgagcagtgcgcgggcttcttgcgcattaaccacggtgataacccgctggacgcgtctaccgttcacccggaagcctatccggtggtggaacgcattctggcagcaacacagcaggcactgaaagatctgatgggtaacagcagcgaactgcgtaacctgaaagcgtctgactttactgatgagaaattcggtgtgccgacggtaaccgacatcatcaaagagctggaaaaaccgggtcgcgatccgcgtccggaatttaaaaccgctcagtttgccgatggcgtcgagacaatgaacgacctgcaaccgggtatgatcctcgaaggcgcagtgaccaacgtcaccaactttggcgcgtttgtcgatattggcgtgcatcaggacggcctggttcacatctcttcattgtcgaacaagtttgtggaagatccgcataccgtggtgaaagcgggcgacattgtgaaggtgaaagtgctggaagtggatcttcagcgtaaacgtatcgccctgactatgcgcctggatgagcagcctggcgaaaccaacgctcgtcgcggcggcggtaatgaacgcccgcaaaacaaccgcccggcagccaaaccacgcggtcgtgaagcgcagcctgccggtaatagcgcgatgatggatgcgctggcggcggcaatgggcaaaaaacgttaaacgcccgtactggcctacggttcgaatttgcacgaaatcgtagggcagataaggcgttcacgccgcatctggcaacgaacgccttgcctgacataaaagtgccggagaatatctccggcatttttattccacagccaaactcataatatattccggcaatatttatcatttcattaacaactgaaaccttaattaaacattagccagtccgggtaattcactattcgaattatattttcgctgcgatataaccttgagccacatcaacattgagtcagattattattcaaaccaacattcgcacacattttaagtattgctgatagaaaccattctcattatcattgtgttgttgattatttaatctctcctttgttggcaaatcatctggtctcatgtcgctgtcaaacgccccatgaggtagttatccagttaatgagaaacaagtaggcacctatgcaatacactccagatactgcgtggaaaatcactggcttttcccgtgaaatcagcccggcatatcgccaaaaactgctttctcttggcatgttacctggctcctcttttaatgtggtgcgcgtcgctccactcggcgaccccattcatatcgaaacccgtcgtgtgagcctggtattacgcaaaaaagatctggccttattagaagtggaagcggtttcctgttaatacggtgataacaacaatgaaaaaattaaccattggcttaattggtaatccaaattctggcaagacaacgttatttaaccagctcactggctcacgtcagcgtgtaggtaactgggctggcgttaccgtcgaacgtaaagaagggcaattctccaccaccgatcatcaggtcacgctggtggacctgcccggcacctattctctgaccaccatctcatcgcagacctcgctcgatgagcaaatcgcctgtcactacattttgagtggcgacgccgacctgctgattaacgtggtggatgcgtctaaccttgagcgtaacctgtacctgacgctacaactgctggaactcggcattccctgcattgtggcactgaacatgctcgacattgccgagaagcaaaatattcgtattgaaattgatgctctgtcggcgcgtctgggctgtccggtgatcccgctggtttcaacccgtggtcgcggtattgaagcgctcaagctggcgattgatcgctataaagctaacgagaatgtggaactggtacattacgcacagccgctactcaacgaagcagattcactggcaaaagtgatgccttccgacatcccgctgaaacaacgtcgctggctgggcctgcaaatgctggaaggcgatatctacagccgcgcctacgccggtgaagcgtcgcagcatcttgatgccgccctcgcccgtctgcgtaatgagatggacgatccggcgctgcacattgccgatgcgcgttaccaatgcattgctgccatctgtgatgtggtaagcaacaccctgacggcagaacccagccgtttcaccactgcggtagataaaatcgtgctcaaccgtttcctcggcctgccgattttcctctttgtgatgtacctgatgttcctgctggctatcaacatcggcggggcgttacagccgctgtttgacgtcggctccgtggcgctatttgtgcatggtattcaatggattggctacacgctccacttcccggactggctgactatcttcctcgcccaaggactgggtggcggtattaacaccgtgctgccactggtgccgcagatcggcatgatgtacctgttcctctccttccttgaggactccggctatatggcgcgtgcggcgtttgtgatggaccgcctgatgcaggcgctgggcttgccggggaaatcctttgtaccgctgatcgttggtttcggttgtaacgtaccgtcggtaatgggtgcacgtacgcttgatgcaccgcgtgaacgtctgatgaccatcatgatggcaccgtttatgtcctgcggcgcgcgtctggctatcttcgcagtatttgcggctgccttcttcgggcagaacggtgcgctggcggtcttctcgctgtatatgctcggtatcgtgatggcggtgctgactggcctgatgctcaagtacaccatcatgcgcggtgaagcgacgccgtttgtcatggagctgccggtctaccatgtaccacacgttaaaagcctgattatccagacctggcagcgcctgaaaggcttcgttctgcgtgctggtaaagtgattatcatcgtcagcattttcctgagcgctttcaacagcttctcgttgagcgggaaaattgtcgataacatcaacgactcggcgctggcttccgtcagccgggtgatcaccccggtcttcaagccgattggcgtgcatgaagataactggcaggcaacggttggcctgtttacgggcgcaatggcaaaagaagtggtggtgggtacgctcaacaccctctacaccgcagaaaatattcaggacgaagagttcaatccggcggaatttaacctcggtgaagagttgttcagcgcggtagatgaaacctggcagagcctgaaagacaccttcagccttagcgtactgatgaaccccattgaagctagcaaaggcgacggcgaaatgggtaccggggcgatgggtgtgatggatcagaaattcggtagcgcagctgccgcatacagctatctgattttcgtcctgctgtatgtaccgtgcatctcggtgatgggagccatcgcccgtgaatcaagccgtggctggatgggcttctccatcctgtgggggctgaatatcgcttactcactggcaacattgttctatcaagtcgccagctacagtcagcacccaacttacagcctggtgtgcattctggcggtaatcctgtttaacatcgtagttatcggcctgctgcggcgcgcacgcagtcgggtggatatcgaactgctggcaacgcgcaaatcggtaagcagttgctgcgcagccagcaccaccggtgattgccattaatggcttcacttattcaggtacgcgatttgctggcgttacggggccgtatggaagcggcccagataagccagacattgaacacgccgcagccaatgattaacgccatgctgcaacagctggaaagcatgggcaaagccgtgcggattcaggaagaacctgacggctgcctctctggcagttgtaaaagctgcccggaaggcaaagcctgtctgcgcgagtggtgggcgctgcgttaaccatactccatcgcctgttttgaaaagcccggtatgcgtttgcatccgggcttttttgcgtgcggctttccataaaaatgcaattcttgcagcgcgacgtaagttcctctgaaagcgtctcgcagggatgaaaactggctaatgcacaggtgtggagtggcgcgtagagtcgcggcattcaaacaacaggtgaaggaacgccatgagtaaaaagcagagttccaccccacatgatgcgctgttcaaactctttttacgccaaccggacacggctcgcgattttcttgcattccatttaccggcccccattcacgcgctctgtgatatgaaaaccctcaagctggagtcgagcagctttattgatgacgatctgcgtgaaagctactccgatgtgctgtggtcggtgaaaacggaacaaggaccaggatatatctattgtctgattgaacatcaaagcacctcaaacaaactgatcgcatttcgcatgatgcgttacgccattgccgcaatgcaaaaccacctggatgccggatacaaaacgttgccgatggtggtgccattgttgttttaccacggtattgaaagcccctatccctattcgctgtgttggctggattgttttgccgatcccaacctggcaaggcagctttatgcctctgcatttccgctgattgatgtcaccgtcatgcctgatgatgaaatcatgcagcaccgacgtatggcgctgctggagttaattcaaaaacatattcgtcaacgcgacctgatggggctggtagagcaaatggcctgcttattaagtagtggatacgctaatgacagacaaatcaaagggctgtttaattacatactgcaaactggcgacgctgtacgttttaacgattttatcgacggcgttgccgaacgttcaccgaaacacaaggagagtttaatgactattgcggaaagattgcggcaggagggggaacaatccaaagccctgcatatagccaaaataatgcttgaatccggagttcctcttgcagacatcatgcgctttaccgggctgtcagaagaagagttggctgcggcgagtcagtaaagttctgtctcgccatttcaaaagccacctacaccctctgcttcaacgccaccagcaggtgacaaaactcggccggatgcgaaataaatggcgcatgggccgctttggcgaagatatatgattcgctgtgaggccaaagtttatccagcatcggcaccactttgcgcggcaccagaccgtcgagatagccatacaatcgcaaaaacggcatggacacgttttgcagcggctgacggagatcgaccgttttcaggatttccagcccgccattaagcacgtcaacctccggcatcggtaacgccagaacggttttcttcaacgcccgcgcatcctggcgcgccgtttcagtccccatggtttgtaacgccaggaaccgctccactgtacgctgaaaatcatcactgagttgctgctgaaatcccgccagcacgtccggttttatccccggccactcgtcacgagcactaaaacaaggtgacgacgccacggtgaccagcgcctgaacacgctcgggatgggttaacgcaatctggcttgccaccagcccgcccagactccagcctaaccaaatggctttatcaggtgcctgttgcagcacggcttcggccatatcagcaagtgacagcgcaccaaatccccggctacgcccgaagccgggcaggtcaacaaggtgcagcgtaaaatgcgagctaagttcctcgtcaatgcaacgccacacttcggcattcagtccccatccgtgcagcagcacaagatgaacattcccctgacctttggtctgccaccagatgttattcatccgctattgttctcttttgacttacaaggatgaacatatgctaacagtaccgggattatgctggctatgccgaatgccactggcgttaggtcattgggggatttgttcggtctgttcacgcgccacccgcacagataaaacgttatgcccacaatgtggattacccgccacacactcccatcttccctgcggtcgctgcctgcaaaaaccgccgccctggcaaagactggtcacggttgccgactatgcgccgccgttaagtccgcttatccaccagcttaaattttcccggcgcagtgaaatcgccagcgccctgtcacgtctgttactattggaagtcttacacgctcgtcgcaccaccgggttgcaattgccggatcgcatcgtcagcgttccgttatggcagcggcgtcactggcgtcggggatttaatcagagcgatttgctgtgtcagccgttatcacgctggttgcactgccaatgggatagcgaagccgtcacacgtacacgggccactgcgacccagcattttctcagtgcccggctgcgcaagcgcaacctgaaaaatgcctttcgtcttgaattgcccgtgcaaggtcgccatatggtgattgtggatgatgtcgttaccaccggaagtaccgtcgcagagattgcgcagttgcttttacgcaatggtgcggcggctgtccaggtctggtgcctttgtcgaaccttgtagagcctcgatgatgggcgtattataaccaactaaaatagtcaactattaggccattactatgatccgtatttccgatgctgcacaagcgcactttgccaaactgctggcaaatcaggaagaagggacacaaatccgcgtatttgtgattaaccctggcacgcctaacgctgaatgtggcgtttcttattgtccgccggacgctgtggaagccaccgacacagccctgaaatttgacctgctgaccgcgtatgttgatgagttaagcgcaccatacctggaagatgcagagatcgattttgttaccgaccagttgggttcccagttaacgctgaaagccccgaacgccaaaatgcgtaaagtggcagacgatgcaccgctgatggagcgcgtggagtatatgctgcagtcgcagatcaacccacagcttgctggtcacggtggtcgcgtttcgctgatggaaatcaccgaagacggttacgccattctgcaatttggcggcggctgtaacggttgttccatggtcgatgtgacgctgaaagaagggatcgagaagcagctgctgaacgaattcccggagctgaaaggtgtgcgcgatctcaccgaacaccagcgcggcgaacactcctactactaagttatcccctcttttgtagattgcccgatgcgacgctaaagcgtcatttcgggcctacgttgaacatgtgccagacgttggcgcagcattgctttgtcaaatcctcggttcgtttccccgcgataatatgaccaacctctcataatttaaatttaccccgctctggtgattctcaaacgccagatgttacccgtatcattcacatgggtaccaaacatactcctgacatctgactacaataattagttttagtgggtatcagtcgtggtgccgcaatatctctgttcccgattgggataattagagtttgtcgtcagaaaattgacgttacccataacaaatgaaaggccaggtaaatcatgccattagtcattgttgctatcggtgtaatcttgttgttgctcctgatgatccgcttcaaaatgaacggcttcatcgctctcgtcctcgtggcgcttgctgttggattaatgcaaggaatgccgctggataaagttattggctccatcaaagccggtgtcggcgggacgctcggtagccttgccctgatcatgggttttggcgcaatgctgggcaaaatgctggcagactgcggtggcgcacaacgtatcgccaccacgctgattgccaaatttggtaaaaaacacatccagtgggcggtggtactgaccggttttaccgttggttttgccctgttctatgaagtgggctttgtgctgatgctgccgctggtgtttaccatcgcggcttctgcgaatattccactgctgtatgttggtgtaccaatggcggctgcactgtctgtgacccacggcttcctgccaccgcatccgggtccgactgcgattgccaccattttcaatgccgatatgggtaaaaccctgctgtacggtactattctggcaatcccgaccgtgattctcgccggtccggtttacgctcgcgtgttgaaaggtatcgataagccaattccggaaggtctctacagcgcgaaaaccttcagcgaagaagagatgccgagctttggcgtcagcgtctggacctctctggtgccggtagtactgatggcgatgcgtgcgattgccgaaatgatcctgccgaaaggtcacgctttcctgccggtagcggagttcctcggtgacccggtaatggcaacgctgattgccgtgctgattgcgatgttcacctttggtctaaaccgtggtcgttcaatggatcagattaacgacacgctggtttcttccatcaaaatcattgcgatgatgctgttgatcatcggtggtggcggtgcgttcaagcaggtgctggtagacagcggcgtggacaaatacattgcttccatgatgcacgaaaccaacatttctccgctgctgatggcctggtcgattgctgccgtactgcgtatcgcgctgggttccgcaaccgttgcggcaatcactgcgggtggtatcgcggcaccgctgattgcaacgacgggtgttagcccggagctgatggttattgcggttggttccggtagtgtgattttctctcatgtgaacgatccgggcttctggctgttcaaagagtactttaacctgactatcggcgagaccatcaaatcctggtcgatgctggaaaccattatctcggtgtgcggtctggtaggctgtctgctgctgaatatggtgatttgataacactgactgccggatgcggcgtgaccgccttatccggcctacgattcgggatgaattagtaggccggataagacgcgtcaagcatcgcatccggcatcaaccgcactctacttcttcttcgctgcagctctgcgccgtctgtccaaatccttcagcaacttgttcacgccatcatcggcaaacatcgactcaagcgttgcggaaagcttgcgtcgccagtttttatactggtaactggtgccaggaatattcaccggttcggccatatccagccagtcttccggctgtagtcctaacagagcactgttactgtcggcaatgtagcgctgcaaaccacggttcagcgtcggcgtcatcgacatcaacgatgccttatgcccggcacgtttcggcagacaaccatatttatgcagtgcatccagcagcccttgcttcgccagttcgcgatcctgatacagaccgcgcagtaccacttcatccggatacagccccagggttttgcccagcgttagatccccgctctcccagtaaccgcgcagcgttggcaggtcatgtgtcgccgcaaccgccatcgactgctccggatacgctttcggtgcacggaacgtcttctcgtggtcgttttcgaaatagagcactttgtaagagtacacaccgctgctgcgcagcttaccgacaatctctaccggtacggtaccgagatcttcaccaatcaccatacagcgatgacgtttactttcgagtgccagaatcgagagcagatcatccaccggatagtgaacatacgcgccctgatctgccgtctcgccatacggtatccaccacaaacgcagcatcgacatcacatggtcaattcgtaatgcgccgcagttttgcatattggcacgcaacagctcgataaacggttcataggcacgcgcggtgatgatatgcgggtccattggcggtaatccccagttctgccccaacgggccgaggatatccggcggcgcgccaaccgatgctttcaggcaatatagttcacggtcacaccaggtttccgccccaccttccgctacgccaaccgccagatcacgatacaagccaatcggcatttcatagccctggcttatctcccagcaggcggcaaactggctgtaagccagccactgcaaccagagataaaaatcgacgtcatcacgatgttcttcgcagaactgacgcacttctggtgaatccacgttctgatacatctctggccatgcaggccagccccagcgcatttcgtcctctttcacttgctgggcatgtagcgcatcaaaggctgcctgccagaacaggctgtcgccctgctctgcaacaaactggcgaaacgcggccatctgctcatcatcacgttgcgcgaaacctttccacgccattcgtaatgctgtcatttttagggcggtaaccgtggagtaatcgacccagtcggcatcgcgcgcctgttgcagcgtctgttgcgtggtcggcaactgccaccaggcctgagcctcttcgctaagatggaaatcttcaacggcgttaacgtcgatataaatcacattcagccaacggcgagaagacgggctgtatgggctggcgctctccggatttgccggatagagcgcatgaatcgggttcaggccaatgaacgacccgccacgttttgccacatccaccagcatcgctttgagatcgccaaaatccccaataccccagtttttttccgatcgcagcgtataaagctgaacgcaggcaccccacagcttttgtttattcagcaacgcctgcggttcgtaacagcgtttcggggcgacaatcacccggcaatgcgcgcgctggtcgtcctgggtgagtgtcagcgtgtgataaccttccggcagcttcgtcggtagattgaacgctttgccccccgttacatggcctttgtactgcgttccttcttcggtggtcagcagccagctatattcgccgctgccctccaccaccatcggcatttttttgccgctggtataaaccatgacattcgggactggcgttaccgccactttcgtggcggtacgttgatgcatcgcgtcaagcaaacgccgtttggtttcggcgctaatcgactgcggtttaccgtgggcattgatgtaattggggctaatccccgccgccagcgcggcattatccagacgtttgctttccatcgagcttccttagcgttttgcctgccagatacgagcctgataatcgcgaatagagcgatccgagctaaacataccgcagcgggcggtattgaggatcgccgcgcgagtccaggcctcctggtcgcggtacagcacatccacctgcttttgtgcctctacataggctgcgaaatccgccatcaccagatacggatcgccgccctgtttgccgatactgtgcagcatctggtcgaaggcatgcttatcgccgtcgctgtatttaccgctttccagctctttcaatactgcgtccagcaccttatctttcttccgccatttcaccgggtcgtagcctttggccagaattgccttcacttgttccacggtatgaccaaaaataaagatattttcttcaccgactttctcggcgatttcaacgttcgccccatccagcgtaccgacagtaagcgcaccattgagcgccagtttcatattgccggtaccggaagcttctttacctgcagtcgaaatttgttcggagatatccgccgccgggatcagtttttccgccgccgaaacgcaataatccggcaggaacaccaccttcaacttatcgccaaccagcggatcgttgttgatcacgtcagccactttgttgatcgcaaagataatattcttcgccaggtagtagcccggtgccgctttcgcgccgaagaggaagacgcgcggtacgcgatcagcctgcgggttttcacgaatttctttgtacaacgccagaatatgcagcagattcaggtgctggcgtttgtactcatgcaaacgtttgatctgaatatcgaaaatcgcctgtggattgatctcaataccggtacgaactttcacaaactccgccagacggactttattcgcctgcttgatctcgcgatattgctgacggaatttcgcatcatcagcgaatttttccagattgatcagctgatcgagatcgttagcccactctttttgcagtgatttatccaacagagccgccagtgccgggttgcactgtttgatccagcgacgtggggtaataccgttggtgacgttatggaatttgttcggccatagctggtgatattccgggaacagatctttcaccaccagatccgagtgcagcgccgcaacaccgttcaccgcgaaaccgccaaccacacacaggttcgccatatgcacttgtttgtcgtgcaccaccgccagtttggcccacactttttcatcgcccggccaggttttctctaccagcgttttaaagcgagtattaatttcgttaataatctgcatatggcgcggcagtaagcctttcaccagtttcacctcccagcgttccagcgcttctggcatcagggtatggttggtgtaagcgaaagttttgctggtaatggcccaggcgtcatcccagctcatctggtgctcatcgatcagcacgcgcagcagttctggaatcgcgatagttgggtgggtatcgttcagctgaataacttcgtaatccgccagttcgtgcagtttacgccccgccagatgatgacgacgcaaaatatccgctaccgaacaggcacactggaagtactgctgcatcaagcgcagctttttaccggcagtatggttgtcgtttggatagagaactttggtcagtttttccgcattgatgccctgctgttcggcacgcaggaaatcaccgtcgttaaatttagtcagatcaaacggatgcgcgtgcgtcgcctgccacagacgcagcggctgcgccacgccattacgatagccgacaacggggagatcccacgcttgaccggtaatagtaaactccggctcccagcgtccgtctttcgtcactttaccgccaatccctacctgcacatccagtgcttcgttgtggcggaaccacgggtagttactgcgatgccagtcatccggcgcttcaacctgtttgccatcgacaaaagactggcggaacaaaccatattgatagttcagaccgtaacccgtcgcagactgaccgacagttgccattgagtcgaggaagcacgccgccagacgtcccagaccaccgttacccagcgccgggtcgatctcttcttccagcaggtccgtcagattgatgtcataagccttcaacgaatcctgtacatcctgataccagccgagattcaacaggttgttgcccgtcaggcgaccaatcaaaaactccattgagatgtagttaacatgtcgctgattcgccaccggcttggcgaatggctgagcacgcagcatttcggccagtgcttcactcactgctagccaccactggcgaggagtcatttcagccgcagaatttaagccataacgctgccactgacgtgaaagcgcttcctgaaattgcttatcgttaaaaataggttgtgacataggagttccacttttcttagattttcaacacaacgttatcgctagtttgccaggctcgatgttgaccttcctcatcctgcgggggattaggcagggaggagttgcggggatgagcaaggaaatgtgatctcaaccacttaaagctagtgcaaaccacaggattagcagcaaatcaatgcaatacagcgcagaaaatctgtatctaagtgcaaaaaatggccgttgcgtattttcaaaaagcggaaggtaactctataaattaagtaaaggagtgaaacagtttcacaagtaaaatatccagtgtgctccatctcattcttaatagatttattaagatcatctttttagatggcactttcatcaggaatgaagaagaaacccttgcttaaatgaatctgatgaacataagggaaaccagtattcacgctggatcagcgtcgttttaggtgagttgttaataaagatttggaattgtgacacagtgcaaattcagacacataaaaaaacgtcatcgcttgcattagaaaggtttctggccgaccttataaccattaattacgaagcgcaaaaaaaataatatttcctcattttccacagtgaagtgattaactatgctgattccgtcaaaactaagtcgtccggttcgactcgaccataccgtggttcgtgagcgcctgctggctaaactttccggcgcgaacaacttccggctggcgctgatcacgagtcctgcgggttacggaaagaccaccctcatttcccagtgggcggcaggcaaaaacgatatcggctggtactcgctggatgaaggtgataaccagcaagagcgtttcgccagctatctcattgccgccgtgcagcaggcaaccaacggtcactgtgcgatatgtgagacgatggcgcaaaaacggcaatatgccagcctgacgtcactcttcgcccagcttttcattgagctggcggaatggcatagcccactttatctggtcatcgatgactatcatctgatcactaatccagtgatccacgagtcaatgcgcttctttattcgccatcaaccagaaaatctcaccctggtggtgttgtcacgcaaccttccgcaactgggcattgccaatctgcgtgttcgtgatcaactgctggaaattggcagtcagcaactggcatttacccatcaggaagcgaagcagttttttgattgccgtctgtcatcgccgattgaagccgcagaaagcagtcggatttgcgatgacgtttccggttgggcgacggcactacagctaatcgccctctccgcccggcagaatacccactcagcccataagtcggcacgccgcctggcgggaatcaatgccagccatctttcggattatctggtcgatgaggttttggataacgtcgatctcgcaacgcgccattttctgttgaaaagcgccattttgcgctcaatgaacgatgcactcatcacccgtgtgaccggcgaagaaaacgggcaaatgcgcctcgaagagattgagcgtcaggggctgtttttacagcggatggatgataccggcgagtggttctgctatcacccgctgtttggtaacttcctgcgccagcgctgccagtgggaactggcggcggagctgccggaaatccaccgtgccgccgcagaaagctggatggcccagggatttcccagcgaagcgattcatcatgcgctggcggcaggcgatgcgctgatgctgcgcgatattctgcttaatcacgcctggagtctgttcaaccatagcgaactgtcgctgctggaagagtcgcttaaggccctgccgtgggacagcttgctggaaaatccgcagttggtgttattgcaggcgtggctgatgcaaagccaacatcgctacggcgaagttaacaccctgctagcccgtgctgaacatgaaatcaaggacatcagagaagacaccatgcacgcagaatttaacgctctgcgcgcccaggtggcgattaacgatggtaatccggatgaagcggaacggctggcaaaactggcactggaagagctgccgccgggctggttctatagccgcattgtggcaacctcggtgctgggtgaagtgctgcactgcaaaggcgaattgacccgctcactggcgctaatgcagcaaaccgaacagatggcacgccagcacgatgtctggcactacgctttgtggagtttaatccagcaaagtgaaattctgtttgcccaagggttcctgcaaaccgcgtgggaaacgcaggaaaaagcattccagctgatcaacgagcagcatctggaacagctgccaatgcatgagtttctggtgcgcattcgtgcgcagctgttatgggcctgggcgcggctggatgaagccgaagcgtcggcgcgtagcgggattgaagtcttgtcgtcttatcagccacagcaacagcttcagtgcctggcaatgttgattcaatgctcgctggcccgtggtgatttagataacgcccgtagccagctgaaccgtctggaaaacctgctggggaatggcaaatatcacagcgactggatctctaacgccaacaaagtccgggtgatttactggcaaatgaccggcgataaagccgccgctgccaactggttgcgtcatacggctaaaccagagtttgcgaacaaccacttcctgcaaggtcaatggcgcaacattgcccgtgcacaaatcttgctgggcgagtttgaaccggcagaaattgttctcgaagaactcaatgaaaatgcccggagtctgcggttgatgagcgatctcaaccgtaacctgttgctgcttaatcaactgtactggcaggccggacgtaaaagtgacgcccagcgcgtgttgctggacgcattaaaactggcgaatcgcaccggatttatcagccattttgtcatcgaaggcgaagcgatggcgcaacaactgcgtcagctgattcagcttaatacgctgccggaactggaacagcatcgcgcgcagcgtattctgcgagaaatcaatcaacatcatcggcataaattcgcccatttcgatgagaatttcgttgaacgtctgctaaatcatcctgaagtacctgaactgatccgcaccagcccgctgacgcaacgtgaatggcaggtactggggctgatctactctggttacagcaatgagcaaattgccggagaactggaagtcgcggcaaccaccatcaaaacgcatatccgcaatctgtatcagaaactcggcgtggcccatcgccaggatgcggtacaacacgcccagcaattgctgaagatgatggggtacggcgtgtaagtttagccggataacgcgccagatccggcttacatctctgcatcattcaatgctcacccgcgttacgccatctgtttctatcaaactaaaccgcaccggcaagaaacgctccaccaccgcgatattggtcagcagatggcatgagggatgggcgaccgtaaattcccccgcgcccgccagcgccatcggtagcaccagttggtcagcaagatattcccccaccgccgccgtgcttgccaggtagcgtttcacctctttcaccaactgtgccgcaaccacctcggcactgacgcgcttttcaccgacgacaaaaaagcgttcggtgatattttcactttcgacttcaagcgagacggtattacccggcccctggtcgcgcggcaggttatgaatattctgttcatgcagggaaaaactccccgccagtgtagcgatttcacgctcagcaacatggcgcggcacaccagctaatagaacttctccacgcatctgcacaatgttcccgcgctcgccaagttgcaaggtgttaaacgatgccacgggcgagacttccgttgccaccacaccgcctccggcagggtaaaaaccgtggcgtaacagcgtggtttgctgatgaattcctattttcgccagcagcggctccagcacccggcggataaaatccgcaggcggcgccgacgggttatcggtgccgccgctcacttcaacacgcgaaggtccatcggcaaaccacagcgcgggcagcaccgtttgcagcaccagcgtacaacttccggcgctaccgatagcaaagcggtaatcgccgccgcgcacggtgccgggccggaagagcagacgctgcgaccccagctccgcgccttccacggttgctccgcaaatttccgtcgccgcctttaccgcggtcagatgctggcgcaacagccccggtttcgcccgcccggcacgaatgctggtgatggtaaatggctggccggttatcatcgacaggctcagcgccgagcgcaggatctgcccgccaccttcgccctgtgcgccatccagcgcaatcatccttttcatcatttatccttttacgcacaccacctgacgcagggtatagataacttccaccagatcgctttgtgccgccatcaccgcatcaatatctttatacgccatcgggatttcgtcgatcacttcggcatctttacggcattccacatgcgcggtggcacgaatttgatcttccacgctgaacagttttttcgctttagttcggctcattacccgcccggcaccgtggctgcacgaacagaacgactcttcatttcccagcccacggacgataaagctttttgctcccatcgaaccgggaataattccatattgaccagcacgcgcagacaccgcgcctttacgcgtcacgtagatctcttcaccaaagtgctgttctttttgcacatagttgtggtgacagttgatctcttccatcgccagcgtttgtggctgtctgaccgttttctgcgtaatgctctgcaatgccgttaccacgttttccatcatcgcatcgcggttaaggctggcaaaaagctgcgcccaggccacggctttcaggtaatcatcaaagtattccgtaccttccataaagtacgccagatcacgcgacggcaacgtctcaagcgtttcctgcatctctttttgtgccagatcgataaagtaagtcccgatggcgttaccaattccgcgtgaaccggagtgcagcataatccacacctggtccgactcatcaaggcagatttcaataaagtggttaccggttcccagcgttcccaggtgtttatagttattggtattcaggaaacggggatatttttgcgttaaccactgataaccggcttcaagctcagcccatttagcatcgacgttaacaggtggattttcccaggcacctttatcacgtttacaacggccagtggtacgcccgtgcggcacggccgtttcaatcgcctgacgcagctctgccaggttttcaggcaggtcttccgccgttaacgcggtacgcagcgcgttcattccacagccaatatccacgcccaccgccgccggaataatcgcccctttggtcgggatcacgctaccaatggtggaacctttacccaggtgtacatcaggcattaccgcaatatgtttgaaaataaacggcatcttcgccgtattaataagttgctgacgcgcatcggcctctaccggcacgcctttggtccacatttttaccggggcattttcagtggtcagtaattcgtaattcattttgtttttctcttttcgttgtttgctgtcctgataattgcaaccgtcgtgccagaaaattaaataagcagcttaattttttaattcattgttttaaaaaagattatatctttacgtccgtaaccggagatttcccgcaaagccaatttaccgataatgaaatatcgtcttttataaggatatctaagatgcgtaaaacagtggcttttggctttgtcggtaccgtactggattatgccgggcgcggcagtcagcgctggtcaaaatggcgtccgacactctgtttatgccagcaagaatcgttggtcatcgatcgactggaattgttgcacgacgcccgctcgcgctcgctatttgaaacgcttaaacgcgatatcgccagcgtttcgccagaaacagaagtggtgagcgttgagattgaactgcataacccgtgggatttcgaagaggtctacgcctgcctgcatgatttcgcccgtggttacgagtttcagccagaaaaagaagactatttaattcacatcaccaccggtacccacgtcgcgcagatttgctggtttctgctggcagaagcgcgttacctgcccgcccggctgatacaatcttcacctccgcgcaaaaaagaacagccgcgcggcccaggtgaagtaacgattatcgatctcgatttaagccgttataacgccatcgccagccgctttgccgaggaacgccagcaaacgcttgattttcttaagtccggcattgccacgcgtaacccccacttcaaccgcatgattgagcagatcgaaaaagtggcgatcaaatcccgcgcgccgattctgcttaacggtccaaccggcgcgggcaagtcatttctggcgcgacgcatcttcgagttaaaacaggcgcggcatcagtttagcggcgcgtttgtggaagtgaactgcgccaccctgcgcggcgataccgccatgtcgacgctgtttggtcatgtaaaaggcgcgtttactggggcgcgggaatctcgtgaaggtttattacgcagcgccaacggcggaatgttgtttcttgatgagattggcgaactgggcgcagacgaacaggcaatgctgctgaaagccattgaagagaaaaccttttacccgtttggcagcgatcgccaggtgagcagtgattttcagcttatcgccggaacggtgcgcgatttgcgccagctggttgccgaaggcaaatttcgcgaagatctgtacgcgcggatcaatctctggaccttcaccctgccgggtctacgccagcgccaggaagatattgaaccgaacctggattatgaagtggagcgccacgcctcactcactggcgacagcgtgcgttttaacaccgaagcgcggcgcgcctggttggcttttgcgacctctccccaggcaacatggcgcggtaactttcgcgaactttctgccagcgtcacgcggatggccacctttgccactagcggacgcatcactctggacgtggttgaagatgagataaaccgtctgcgctataactggcaggagagccgcccctccgcgcttacggcgttgctgggcgcagaggcagaaaacatcgatctcttcgaccgtatgcaactggaacacgttatcgctatctgccgccaggcaaagtcgctttccgcagccggacgccagctttttgacgtttcgcgccagggcaaagccagcgtcaatgacgcggatcggctacgcaaatacctggcgcgttttggtctgacgtgggaagccgtgcaggatcagcacagctccagttgaatatggtggtccgtcagcacctgcatcacgcttactggcggcggggcgtcggtgtagacggcatctaccatgctgatgctgcccatattgaccatcgcgttacggccaaatttcgagtgatcgacaaccagcataacgtggcgcgagttctcaataatggcgcgtttggtgcgaacttcgtggtaatcgaactccagcagcgagccgtcgctatcgatgccgcttatccccagaatgccgaaatcaaggcggaactgggagataaaatcgagcgtcgcttcgccaatgatcccgccatcgcggctgcgtaattcgccaccggcgagaatgatgcgaaaatcttcttttaccatcaacgtgttagcaacgttgagattgttggtgacaatgcgcaaattgctgtgattgagcagtgcgtgcgctaccgcttccggcgtggtgccgatatcgataaacagcgtcgagccattggggatttgctccgccactttgcgggcgatgcgctctttttcttcggtctgggtggccttgcgatcgtgccacggcgtgttaaccgaactggaaggcagcgccgcaccgccatgatggcgcaggatcaggttttgctccgccagctcattgaggtcgcggcgaatagtctgcgggctgacggagaaatgctctaccagctcttcggtactgacataaccctgctgtttaaccagttcgataataccgttgtgacgttgtgtttgtttcatttataaatccctggaattattttcgttttcgcgcattgagcgaatcaacaaaagccatcgctaaacccacggctaacccggcgatgtgtgctccgttcgccatcgacatcccaaacaaatcaaaccatccggcgacaatccagatcagcgcaaagataattaacccacgttgcaggtaaatgccactttgcggatcgcgttcgccacgtagccagacgtagcccatcagcgcatacaccacgccagaaagcccgccaaaccacggcccgctgaatttttgctgcacatagccgcttaacagggcgctgataagcgtaatgacaattagcttaccgctaccgaggcgtttttccaccgcaccgccgagataccaccaccagagcaggttaaagaggatatgcatcagcgagaagtgcattaacgcgtgggtgaagtaacgccagaactcaaatttcagtgttggatcgaatggccaggccagccataacatcacttcctgatcgccgagaatttgcatggcaataaacaccaccacgcaggcgatcatcatcacccaggttaccggacctgcgcgttcacgcaaggcggcaaagaaaggataacggcgataatgcaggccactgccggtatggcctgcctgccagctcgccgccagataacgcggatctgccgggttttcgagaaaacgcgccagctccgcccgtacgcgctcggcctgggactcatccgccagccagacatcgctttggttatgttgttgaatcgtgaggataacaccctgcgtcgccatgtaatcaacaaacgcctgcgccacgcgggggttagcaaaagaggtaatcatcaacatcgttgctgtcgcttattccacacaaaaggggacagtataaagcgttacgcgccgtacgccacctctgcgggaaactgacgttgccaggcttcaaagccgccgtcaatgctatagaccacatcgtagccctgttgcagcagatactgcgccgcgcctttgctgctattgccgtgataacacatcaccatcaccggagtgtcaaagtcgttatcacgcataaaagcgcccagcgtgtcgttggttaaatggaaagcctgcaccgcatgtcccattgcgaaactctgtggatcgcgaatatcgaccagcaccgcctctttttcctgcaacttctggtgcgcgtcggcaacgttaatacattcgaactgatccatgcgtctctctttctttacaaacaagtgggcaaatttaccgcacagtttacgtcgaagcggcagataaacgccataatgttatacatatcactctaaaatgttttttcaatgttacctaaagcgcgattctttgctaatatgttcgataacgaacatttatgagctttaacgaaagtgaatgagggcagcatggaaaccaaagatctgattgtgatagggggcggcatcaatggtgctggtatcgcggcagacgccgctggacgcggtttatccgtgctgatgctggaggcgcaggatctcgcttgcgcgacctcttccgccagttcaaaactcattcacggtggcctgcgctaccttgagcactatgaattccgcctggtcagcgaggcgctggctgaacgtgaagtgctgctgaaaatggccccgcatatcgccttcccgatgcgttttcgcctgccacatcgtccgcatctgcgcccggcgtggatgattcgcattggtctgtttatgtacgatcatctgggtaaacgcaccagcttgccgggatcaactggtttgcgttttggcgcaaattcagtgttaaaaccggaaattaagcgcggattcgaatattctgactgttgggtagacgacgcccgtctggtactcgccaacgcccagatggtggtgcgtaaaggcggcgaagtgcttactcggactcgcgccacctctgctcgccgcgaaaacggcctgtggattgtggaagcggaagatatcgataccggcaaaaaatatagctggcaagcgcgcggcttggttaacgccaccggcccgtgggtgaaacagttcttcgacgacgggatgcatctgccttcgccttatggcattcgcctgatcaaaggcagccatattgtggtgccgcgcgtgcatacccagaagcaagcctacattctgcaaaacgaagataaacgtattgtgttcgtgatcccgtggatggacgagttttccatcatcggcactaccgatgtcgagtacaaaggcgatccgaaagcggtgaagattgaagagagtgaaatcaattacctgctgaatgtgtataacacgcactttaaaaagcagttaagccgtgacgatatcgtctggacctactccggtgtgcgtccgctgtgtgatgatgagtccgactcgccgcaggctattacccgtgattacacccttgatattcatgatgaaaatggcaaagcaccgctgctgtcggtattcggcggtaagctgaccacctaccgaaaactggcggaacatgcgctggaaaaactaacgccgtattatcagggtattggcccggcatggacgaaagagagtgtgctaccgggtggcgccattgaaggcgaccgcgacgattatgccgctcgcctgcgccgccgctatccgttcctgactgaatcgctggcgcgtcattacgctcgcacttacggcagcaacagcgagctgctgctcggcaatgcgggaacggtaagcgatctcggggaagatttcggtcatgagttctacgaagcggagctgaaatacctggtggatcacgaatgggtccgccgcgccgacgacgccctgtggcgtcgcacaaaacaaggcatgtggctaaatgcggatcaacaatctcgtgtgagtcagtggctggtggagtatacgcagcagaggttatcgctggcgtcgtaaattaacgtaaggtgatcaggtcagatttcaatctggcctgagactgatgacaaacacaaaactgcctgatgcgctacgcttatcaggcctacgtggtttatgcaatatattgaatttgcatggtcttgtaggccagataagacgttcacgtcgcatccggcatgaacaaagcgcactttgtcaaaaatctaacctactttttaattcagggaattaccgcaaagcccacgccatcatacccaacgtaacaaaactcaggcacgttccccactcgccccgagaaaaatagcattaatgcgcccagcgccagcataaaaatgttgagcagaaggtaaattgttggcgtgataaagatattacaaacttcaataataccggcaagtccgacacccagcatggcaataaccgccgccaaaaactgcgccagaatggggatgccgaaaaaagtcattaccagcgaggtcaaaatccattttctgttttgcattattctttccattctttctgaatggcgaaattatactccccgagtccccttgccccttctggacacttttccgaaatgatggcgaaaaaaacgggaccctttggccccgttctatttattagtgaaattacaatctcaccggatcaatatgccagatatgatcggcgtactctttgatcgtacggtcagaagagaagtagcccatattggcaatgttcagcatcgcttttgcggtccactcttcctgaagctcgtaaagttcgtcgactttatcctgacaatcgacatagctgcgataatccgccagtacctggtagtgatcgccgaagttgatcagcgaatcaaccagatcgcgatagcgacccggatcttccggactgaatacaccgctgccgatttgcgtcagcacctgatgcagctcctcatctttctcgtagtattcacgcggtttgtagccctgacgacgcagttcttccacttcttctgcagtgttaccaaagataaagatattgtcagcaccgacatgatccagcatctcgacgttcgcaccgtccagcgtaccgatagtcagcgcgccgttaagcgcaaacttcatgttactggtgccggaggcttccgtccctgccagcgaaatctgttcagacagatcggccgccggaatgatcaactgcgccaggctaacgctgtagttcgggatgaacacgactttcagcttatcgccaatctgcggatcgttgttgatcactttcgctacgtcattgatcaaatgaataatgtgcttcgccatgtaataggccgaagccgccttaccgccaaaaatattcacgcgcggtacccatttcgcatccgggtcggccttgatgcggttatagcgggtaatcacatgcaatacattcatcaattgacgtttgtattcgtgaatacgtttgatttgtacatcgaacaacgcctttggattcaccaccacattcagctgctgggcgatatactccgccagacgctttttgttctccagcttcgcctgatgcacagcgtgattaaccattgggaaatcacagtgttgttgcagctcattaagcaggctaaggtcggtgcgccagttacggcccaggtgttcgtccagcacggctgaaagcgatgggttcgcaaccgccagccagcgacgcggcgtcacaccgttggtgacgttggtgaaacgacccgggaagattttcgcaaagtcggcaaacaacgattgcaccatcaggttagagtgcagttccgatacaccgttaactttgtggctcaccacaaccgccagccaggccatacgcacacgacgaccgttggattcatcaatgatcgacgcccgtcccagcagatcggtatcgttcggatactgttcctgcaaggttttcaggaaatagtcattgatttcaaagatgatctgcaggtgacgcggcagaattttacccagcatatcaaccggccaggtttccagcgcctcgctcatcagcgtgtggttggtgtaagagaaaacctcgcaacagaccccaaacgcgtcgtcccaactaaattggtgctcatcaatcagcaggcgcatcaactcaggaatcgacagcaccggatgggtatcgttgagatgaatcgcgattttatccgccaggttatcgtaggttttatgcaactgataatggcggcttaaaatgtcctgaatggtcgaggaaaccaggaagtattcctgacgcaggcgcagctcacgcccggagtaggtggagtcatccggatacagtacgcgagatacgttctcggagtggtttttatcttccactgccgcgaagtagtcaccctggttgaatttaccgaggttaatttcgctactggcttgcgcactccacaaacgcagcgtgttggtcgcgtcggtgtcgtaaccagggattatctgatcgtaagcgactcccagaatctcttcggtttcaatccagcgcgtttttttaccttcctgctgaatgcgcccaccaaaacggactttatagcgcgtgttgtggcgtttgaattcccacgggttaccgtattctagccagtagtcaggcgactctttctggctaccgttaacgatgttctgcttgaacataccgtagtcatagcggatgccgtaaccgcgccccggcaaccctaacgtcgccagagaatcgaggaagcaagccgccagacgtcccaggccaccgttaccgaggcccgggtcattttcttcatcaatcaactcttcgagatttaaccccatcgcttccagtgcgccctgtacatcttcgtaaattcctagcgacaacatggcgttggagagcgtacggccaatcaaaaactccatcgacaggtagtaaacctgacgagtttcttgcgacaactgggcacggtttgaacgtaaccagcgctccacgagacgatcgcgcacagcaaataacgttgcgttcagccattcatgtttattggcgacgaccgggtcctttccaatcgtaaacatcagcttgtaagcgatagagtgcttaagagcttctacgctaagcgtgggcgatgaatatgtaaacggagcattcatataggcgtttcctgaaaactatttcaagcgatagtaaagctcacggtacgacttcgccgcgacctgccagctaaaatccattgccatagcctgacgttgcacaaaccgccacagtgaaggacgggaccacagtacaaaagcacgtcgaatagcccgtaacagcgaccaggcattactatcttcaaagacaaacccactggcgacgccatctgcaaggttctcaagagaacagtcagaaaccgtatcagcaagcccaccggtgcgccgcactaacggcagcgtaccgtacttcaatccataaagttgcgttaagccgcacggttcaaaacggctgggcaccagaatgacatccgcgccgcccataatgcgatgcgaaaatgcttcgtgatagccaatctgaacgcccacctggccggggtattccgctgccgccgcaaggaaaccttcctgcagcaccggatcgcccgcgccgagtagcgccagctgcccgccctgctccagaaggcccggtaaggcttccagcaccaggtcgagacctttctggctggtcagacggctcaccactgcaaaaagcggcactttatcatcaaccttaagccccattgcgatttgtaactggcgcttattttccgctttatcttccaacgtatcgcgggtgtagcgcgaggccaacagtaagtccgtctctggactccagattttctcgtccacgccgttcagtacgcctgaaagacgcccttcacggtgacgctgttgcaacagaccttccataccgtaggcaaactgcggttcggtgatctcgcgagcgtaggttggactgaccgccgtaatgtgatcggcatagtacagaccggccttcaggaaagagatttgtccgttgaattccagcccatgaatattaaagaatgaccatggcaattggatgtcattcatgtgatgtgcataaaacatgccttgataggccaggttgtgcacagtaaacaccgacttcgcaggacgcccgcgcgccgccaaatacgcaggcgcaagacctgcatgccagtcgtgcgcatgcaccacatcaggacgccagaatgggtcaagaccgctggccatttctgccccaacccaccccagaagcgcaaaacgcaatacgttgtcggtataggcaaataagttggtatcgtgatacgggcttcccggacgatcatagagatgcggcgcgtcaatcaggtatatgccaaccccgttgtaatgaccgaacaacagcgtgatatgcccggcgaaggtatcacgacgggatactacctgcgcatcggtcacgccacggcgaatatcgggaaatgcaggcaacagtacgcgagcgtcaacgccgtctgcgatttgtgctgcgggtaatgccccaataacatcagccagaccgccggttttaagcagcgggaacatctctgaacatacatgtaaaacctgcattatcgctcctgtttatgccctaacttccgtagcatttcgcgcgttaccagcacgatgccttcttctgaacgatagaaacgacgtgcatcttcctctgcgttttcaccaatcaccatgccttccgggataacacaagcacgatcgatgacgcagcggcgcagacggcacgagcgacctacccatacttccggtaacaatacggcggaatcaatgttgcagaatgaattcacgcgaacgcgcgagaacagaacggactgcaccaccaccgaaccggagatcacacaaccgccggataccagtgagttaagggtcatcccgtggctaccggagcgatcctgcacgaatttcgctggcggtaatgattcattgtaggtgcgaattggccaattgcgatcgtacatatccagttccggcaccacagaggccagatcgaggttcgctttccagtaagcttccagcgtacccacatcgcgccagtacggctcggcatccgggtcggattgtacgcaagagagcgggaacgggtgcgcataggccagaccggcttcggtgatcttgggaatcaaatctttgccaaagtcgtggctggagttctcatcacgatcgtcttcttccagcagttcatacagatagtcggcgtcaaagacgtagatacccatactcgccagagatttgctcggatcgttcggcattgacggtgggttagcaggtttttcaacgaattcgataattttatcgttctcatcaaccgccataacgccaaatgcggaggcttcttcaatcggtactggcatacaagcaacggtgcaacgtgcgcctttttcgacgtgatcgataagcatacgcgagtagtcttgcttgtagatatggtcgcccgcaaggatcaccacgtattccgctttataacggcggataatgtcgaggttttgggtgaccgcatctgcggtgccgcgataccagttttcccctttcattctctgctgtgctggcagcagatcgacaaactcgttcatttcttcattgaagaatgaccagccgcgctgaatgtgctgcaccagagtgtgggactggtactgggtgatcacgcccatacgacggatcccagagttgatgcagttagacagcgcaaagtcgataatgcggaacttaccgccgaagtgtacggccggttttgctcgcttattggttaaatccttcaggcgggtaccacgtcctcccgccagtatcagggcaacagatttcaatggcagctggcgcgccaacattaagtgatcgttcttctctaaactaaccatgactaactccttttttatcatctctggaacacacacaatccgtgtgcaggtccctgccagacagccgtaatcactgggttatcctctccagcgaatgggggaatggcgtgccactccccagcaggtaaaacaatctctgttacctcaagcgtggcgttaattgcgatcaaaaagcgatccgagagcagaatttgcagctgtttcggcccgttttgccactcatccgtgcttaaaggttgagcatatcgatttagccaacggacattgccgtcgccttcttcccaccagcgattctccaccaaagcgggaatgcgcttgcgcagatggattaacgcggcggtaaatgcggttaaaccactgcttgcctgcgaccagtccaaccaggttaattggttatcctgacagtaggcattgttattgccatgctggctgtgaccatgttcgtcaccggccagtaacatcggcgtaccctgggagagcaacaacgttgttaacagggcgtgaatgctgtcgcgccgccgttcaaccaggtcaagagtaccgcctaacccttctttaccatgattgttactgtaattgttgttggtcccgtcgcgattttcttctccgtttgcttcattgtgtttatggttgaaacaaacgcagtcgcgaagcgtaaaaccgtcatgcgcggtgacgagattaatcgcggcactcggcagacgaccattacgtttaaaaacatcgctggaggcagcaaaacgcccggcaaacgcccccagaggcaaatcataatgcagccagaaacgacgggcagcatcgcggaaatgatcgttccactcggcaaacagcggcgggaaatttcccacctgataaccaccaggagcgatatcccacggttcagcaattaacttcacctgcgagagcaccgggcagttctggatagcggtaaacaacggcgcatcctgacggaactctggcgtacggcccatgactgccgccagatcaaagcggaaaccatcgacgtggcaggtttctacccaataacgcaggcaggcgctggcataatccaccaccgccggatgactcaaattgagcgtgttgccgcaaccggtccagttgtgataatcgccgtcttctcttatccaataatagctacggttatcgatcccacgcagcgagaataacgggccgtcgaggtccagttccgcactatggttgagcacgatatcaagaatgacttcgatacccgctttatgcagtgctttgattgcatcgcgaaactcatccagcgccgtttctggcgagcaggcatacgccggatgcagcgcaaacatcgccaccgggttgtaaccccagtagttacttagccccatgcgttgcagacgtggttcactggcaaactgcgccaccggcagcagttccagcgcggtaatgcccaactgtttcaaatagttgagcatcaccggatgccccagggctttataagtgccacggatctcgaccgggatctccgggtgcaggtacgttaatcctttgacatgggcttcataaatgatggtgctgccccacggcgtgcgcggcggggcgtcatcttcccagtcatagtgatcaaccaccactacgcatttcggcgcaatggcggcgttgtcgcgatagtcaggttcattatgaccggcgtgcagcagcgggttatctttaaactccccgtcaatttgccgcgcgcaaggatcaatcaacaacttcgccgggttaaagcgatgcccctcggcgggttgccaggggccatgaacgcgataaccataacgcaaacccgggcgcgcatccggcagataaccgtgccaaatgtcgccactgttccctggcaagtcatagcgatgttcctggccattggcgtcaaagacacacagctctacccgctcggcatgagcggagaaaagtgtgaagttgacgccctgaccgtcgtaatgcgcgccgaggggagcgggtttgccaatggcgagttgtgtcattctgcctcccgaaccagccagatagtggccagcggtggtagcgtcaggcttagtgaatgctgacgaccgtggctggcaatctcatcgctgtgtaccgtgccgccattgcctgcattactgccgtgatagtgcatggaatcggtattgaggatctcacgccatttgcccggctgattgatgccgaagcgataatcatgacgcggcaccggcgtaaagttactggcaacgatgatttcgttaccctctttatcgcgacgcacaaagatcagcaccgagcgttctttgtcatccaccaccagccattcaaagccgtacgggtcaaaatccagttcatgcattgctttatggtggcggtaggtgaggttcagatcgcgcaccagacgctggacaccgtggtgccagttatcgccgccttccaacagatgccagtcgaggctggcgtcatggttccactcgcggccctgggcaaattcgttccccatgaacagcagtttcttgcccgggaatgcccacatccagccatagtaggcgcgcaggttagcgaatttctgccatgcgtcgcccggcatccggtcgagaatcgattttttaccgtggaccacttcatcatgcgacaacggcaggacgaagttttcagtgtagttatagagaatcccgaaggtgagtttatcgtgatgatactgacgataaaccgggtcgagcttcatgtagtccagggtgtcatgcatccagccgaggttccacttgtaccagaatcccagaccgcccatatcctgcggacgagaaacgccagggaaatcggtagactcctcagccattgtcaccgcaccggaaacctgctcaccaagaatacggttggtattacgcaagaattcaatcgcttcaagattctcgcgcccgccaaattcgttcgggatccactccccctctttacggctgtagtcgcgataaatcattgacgccaccgcatcgacgcgcagcgcatcaataccaaaacgttcaatccagtaaagcgcgttaccgacgaggaagttactgacttcacggcgaccatagttgtagatcagcgtgttccagtcctgatgatagccttcgcgcggatcgctgtgttcatacaagttcgtgccatcaaattcggcaagcgcaaagtcatcggtcgggaagtggcctggcacccagtcgagaatcacgttcagaccagctgcgtgtgcggcatcaatgaaataacggaagtcgtcgcgagtaccaaaacggcgggttggtgcatacaggccggttggctgataaccccaactgccatcgaagggatgctcgttaatgggcagtagttcgaggtgggtaaagcccatccatttagcataaggcaccagttgatcggccagctcgcggtagctcaaccagaaattgttgtcggtgtggcgacgccaggagcccaggtgaacttcataaatagagattggcgcatcaaactgattcgcttttttgcgctcttcagtctgtacaaccttttccggcagcccgcaaataagagacgcggtttccgggcgcatttgcgcttcgaaggcataagggtcggacttcagacgcaagttgccattggcatcaatcatctcgtatttatagagctgaccgttatgcgccccagggataaacagttcccagatgccgctctctttacgcaggcgcatcgggtgacggcgaccgtcccagtagttgaattgcccaaccaccgagacccgacgggcgtttggagcccagacagagaaacgcgtacctgtgacgccatccatagtatctgcatgcgcgcctaaggtttcatacgggcgcaggtgagtaccttcagataatagccaggcatccatttcctggattagcggaccaaaacggtaaggatcatcaatcaggttttgctgaccatgccagacaacagccaactgatagcggaaaaaattcttacgtcgcggaatgacgccactaaagaatccccgtgagtcgagacactccagttttgcgagttttcgcccggttttcggttcaatcacccacacatcggtagcgtcgggtaaaagggcacggacttccagtcccgcggtggttttatgcattcccagtacggaaaaaggatccgcaaaatggcctgcaattagcgcgttaatcacgtctctatcgatacgatcggacatgcttgtcttcctgttttattgtgtcaccccatccaattggatttttgacttctggttgtgacattttttgacctgaacggcgcagcactctgtgcatcctctctgcgtcgtcctcacttcaggtaaggctgtgaatactcatgtattcagccacccttaaagaatagccaatgctctatttaactcccggtaaatcatgaaacatctgcgcttactcctgtattacgcactaacaggggcggcatcgcgccccagatttaatgaataaagattacgccagttgacgaagcatccgacgtagcggctccgcggccccccacagcagctggtcgcccacggtaaaggctgacaggaactctggtcccatattcagcttacgcaggcggcctaccggcgtggtcagcgtgccggtaacggcagctggggttagctcacgcatagtgatttcccgatcgttcggaacgactttcgcccacggattgtgcgcagccagcagttcttcgacggtcggaatagacacatcttttttcaatttaatagtgaatgcctggctgtggcagcgcaatgccccgacacgcacacataaaccatctaccggaattacggaagatgtgttgaggatcttgttggtttccgcctgccctttccactcttcgcggctctgaccgttatcgagctgtttgtcgatccacggaatcaggctacccgccagcggcacgccaaagttatccaccggcagctcaccgctacgggttaaggttgtgactttgcgttcgatatcgagaatagcagaggacggggtcgcgagttcatctgccacatggccatacagatggcccatctgggttaataactcacgcatatgtcgcgcaccaccgccggaagcggcctggtaggttgcaacggacacccaatcaacaagatcattggcgaataaaccacccaacgacatcaacatcaggcttacggtacagttaccgccaacaaaagtcctgatgccattatttaatccgtcggtaatgacgtcctgattgacggggtcaagaatgatgatcgcgtcatctttcatgcgcagagacgatgctgcgtcaatccagtaaccttgccatccgctttcacgaagctttggatagatttcgttggtataatcgccgccctgacaggtcacaatgatatcgagggcctttagcgcctccagatcaaaggcatcctgaagtgtgccagtggttccgccaaaagacggcgcagcctggccaagctgagaagtagaaaagaagacagggcgaatggcgtcgaagtcgcgctcttcaaccatgcgttgcatgagaacggagccgaccataccgcgccagccgataaaaccaacatttttcataagcgttttttcctgcaaagatgtgtgctgtataaatgtgccggtctcctcttggcacatctttcaccatacaaaaagcagccaaagtcgcaagtgaaattaatcaatgatagcgaagccatcagtaatgcgacttatcctgctttgttagcacgcagaaagtccgcggcaattatcagggaatttgagttatgaatgaaatcatttctgcagcagttttattgatcctgattatggatccgctcggaaacctgcctattttcatgtccgtactgaaacatactgaaccgaaaagacggcgggcaatcatggtgcgagagttgcttattgctctcctggtgatgctggtgttcctgtttgcgggtgagaaaattctggcatttctcagcctgcgagcagaaaccgtctccatttctggcggcatcattctgtttctaatcgccattaagatgattttccccagcgcttcaggaaatagcagcgggcttccggcaggtgaagagccatttatcgtgccgttggcaattccgttagtcgccgggccgactattctcgccacgctgatgttgttgtctcatcagtacccgaatcagatgggacatctggtgattgctctgctgctggcctggggcggcacctttgtcatcctgctacagtcttcgctatttttacgtctgctgggcgagaaaggggtgaacgcacttgaacgcctgatgggattgattctggtgatgatggcaacccagatgttcctcgacggcattcgaatgtggatgaaggggtaacgaggagagtttttcgaaaagaacccggtagtgtcacaactaccgggcgaacaaacttaactcaacagctggaacgcaatcatcccaacgatggcaccgacagtgccgaggatggtttccatcatggtccaggttttcagcgtttcggcttcggtcgcgccggtaaatttaccgaacaaccagaaaccggcgtcgttaacgtggctgacaacaatcgaaccaccagcgatacaaatcgacagcgccgccatttgcgcaccggagtagttcagttgttcaataaccggcatcaccagtcctaccgccgttaaacaggctacggtggcagaaccctgaatgatgcgcactgcagcggccagcacgaagcaggtgatggctatcggcaggcccatgccagttaacgcttcgcccagtgccggacctacgccagagtcaaccagcacctgtttgaacacgccgcctgcaccaatcaccagcagaatgatccccgccggttgcagcgcgtgaccgcaaatctccatcactttgtcttttggcatgccctgacgcattgccaggccataaatcgctaccagacaagcaaccagaatcgcggtaaacggatgaccaataaactcgaaccattcgtaagcggtagagccttctggcacaaaacgcgcggcaatggttttcagccccaccagcaccagcggcaacaggatcagcgacaggctgaatccgaaagatggcattttaccttcgccgagatgcggttcgctgatgtcgtcaggaatatgcagctcaacgtaacggctgatgaagttaccccacagcggcccggcaataatcattcccggaattgccgcacacaggccaatcaggatcatccagccaaagtcggcattcatctgcgatgccagcagcattggcgctggcccaggcaccaggaacgcagccgcggccgccacgcctgcgaataatgggattaccagcttcaccaggttcgtaccggtgtggcgcgccattgagaaagcaacgctaatcagcagaacaatcgccacttcaaagaacagcggtagcgcacagaccagccccgcaaggccgatggcataatgcgcgcggctgtgaccgaaggatttgagcattttgacggcaatctgatcgactgcgccggtttcatgtaagatcttgccaaacatagctcccagggcgacaaccaccgccaggaagccgagggtgcctcccatccctttttccatcgtcgctgcgattttatcgagcggcataccggaaaaaaggccagcccccatggacaccaccatcaaagccaggaaagcgtgcatacgcgccttcatgactaaaaacagcagcagtaaaacagacccgactgctgttaaaacaagcgttaatgtagtcactacttatttgccttttttaataacctcaatggtgcttgccacaacaccttccagcggttgatcgatatccaccaccagtacatcggtttcgtccgcacccggctcctgcagcgtttcaaactgcgtcaccaacatttgggttttaaagaaatggcctttgcgcgctttcaggcggctttcaatcacatcaaaatcgcctttcaggtagatgaaagagagattcggattaccttcacgcagcaagtcgcgatagttttttttcaatgcagaacagacgatcagtgacactttattagtgcgctgcatagcaaacgcggcgtcgttcagcgcctgcaaccagggtttgcgatcgtcgtcattcagcggttcgccagacgccattttttcgatattgcgccgtggatggaggaaatcgccatcaagaaacgcggcatgaagttgatgcgccacttcacttgcgaccgcagatttgccgctgcccgatacgcccatcaagacgtaaatgtggtgatcatggttagtcgtgctcaaagtggtgcccccacaatacaagaattaaaaatgttacgggtaactgttatcggtaacattgtccggccggacaatatcagaagcaatatccatccgtgccttaagtgtataagtgtgagctacttcaaatttgtgggcttaaatagatccgcccggtgacaaggtgaaacctaaatctaacattttcggtgtcacagattcgccacgaatacgcgccagcaggcgttcagcgccaatactgcccatccgctcacgcggcgtcagcacgctcgcaagtcgtggctccatcacctgaccaatgtcatgaccgtggaaaccggcaatcgccatatcgtcaggaacttttaaccccagacgctgacattcaaacgccgcgccgaccgccaggtcatcattagtacagaacacgccatccagctgcggatattctcgccgcgcctggcgaatcagttcaataccggaagagtaagaagaagattgctcaaccatcacgctatacggcaccaggccagcatccatcatcgcctgttcgtatcccttctgtttgatgatagtacgttcgtcgagacgcgcgccgagataggcaatatggcaatgcccgcgagcaataatggcggcggtcatctggcgtgccgcttcaaagttatcaaagccgacggcaatatcgaggcatggcgacttgctgtccatcagttccaccacgggaatccccgccacttcaatcatctttaaggtgcgcggcgtgtgggtacgttcggtgaggatcagtccgtcgatattccatgagagcattgattcgagacgttcttgctccatttccggtttataaccgtagtgcgccagcatcgtctgataaccgtgcgcgtcggtgacgctttcgattccgcgtaatacttccgcgaaaacctggttggtgagagaaggtaacaggacgccaatcgcccggctggtggcgttagagaggatatcgggcgcacgattgggaatatagcccagttcatcaagagcagcggcaatcttgccgcgtagagcgacggaaacctgctccgggttgcgtaaaaaacggctgaccgtcattttggtcacgcctacacggtcagccacatcctgaagtacgggtcttttctttttcatcgtcctgaaggtacaaaagagatagattctcttagtttaacacggacgcatcagaaccttcccggggaaaacagtgcttgtttacaattattagatatacactaaatcaattgcatcgcattgtgctaacgacgcggcaaaaccccggaagcgtgcatcagcacgcgaccggagcgagcgaggaagcctgcaaaaaggcaggcttcaaagatgccgttgagttttaaaccggcggcagatcgaacagtaacacttcgctgtcgctatccgcatggatggagattgcctgctcatcccagattgccagaccatcgctggtcgaggctttcacgccgttaatggtgacattgcctttcaccacctggatccagacgcggcgttcagcggcaatctgatgcaccgactgctcatctttcagcaacgcccaacgatacagttccatatcctgatgcactttcaatgaaccatctcgagcatccggcgagagcaccagctgtttgccctgtacggcatcgaagcgacgctgttcataacgcggcgtaatgccattttcttcaggcatgatccagatctgatacagatgcagacgctcggtgctgcttgggttgtactctgagtgacgaatacccgtacccgcactcataatctggaactcacccgccggaacctgctctttattgcccatgctgtcctgatgctcaacagtaccttccagcacgtaggtcaaaatttccatatctttatgcgggtgagtgccgaagccctgccctgcttcaatcacgtcgtcgttaatcacgcgcagcgcggagaagcccataaagttcggatcgtaatagttggcaaaagagaaagtatgccaggagtccagccagccatgatttgcatgaccacgttcatttgctttgcgtaagtagatcatttgtattcgccccatgaatgatttcgatgggcttagtgtggacccgatctgcctgggatgatagagggtgaaaattgacccctctgttcaaaaaaattgaactattcgaggggccatcaaacttacttcgcgagagtcactgtggagggagaggcttgctcaaatccgcgttcaaggatttccagattggtaagaacttcagattccttgacgtaatttggcgcaccgtgggtgatggtttgatacaacgcatcataaacgcgcccgtaatcgcccatctccggcttcatctcttctctgaccgtcacgccctcgtcattgacatactccagcacaccgaccgaatcatccgctgcgaatcccggttcgcccggcataatattagccttcaggctggtttcctgctggtcgataccgtatttaataaacgaacctttcttaccgtgaacgataaatttcggataatcgattttcaccagatggctggttttgacgatggctttcaggtcgccataaaacagttgcgcttcaaaggtgtcgtcaggattggctttattacgcaggctgcggatgtcataagcgacgtgatccgggcgaccgaacagagaaataatctggtccatcgtatgcacaccaaggccataaaacgcgccatcctgcggcagcccaggtttggtttctgccaccgggcggtaatagtcaaaatggctttccacttcaacaatctctcccaacttgccactttcaatcgcttttttcgctgtcaggaagcaggagtcaaagcgacgattctgatacggcgtgacggtcagccctttgcttttcgccaacgcaaacagctccttcgcctgggcaagcgtcggggtgaacggtttttcgaccagcacatttttcccggcttccagcgcgcgtttcgcgtactcgaaatggctgtccgcgtgggtgcagacaacaaccagcttaacatcgggatcgtttagtacttcgtcgagatcgctggtgaaatggatatgggaataaatgggagcctgttcttccggcttcgcatggcgacgaaaaatatgcgcgacatgccagctatccttgcggttaagtacatacggcagatggtaacgggtggtgcttttgccgaagccaataaaggcgcagttgatgaccatgatttcgtcctttttaaggtggttatttacaccttagcgcaaagcggacgtggttcctactggagtgcgcataacgaacacaagcactcccgtggataaattgagaacgaaagatcaaaaaaaaagccagcacccggctggctaagtaatactggaagcaatgtgagcaatgtcgtgctttcaggttctccgcgagggtcttcctgatcgcgagacaataataatcattctcattcgcacttgtccaacactttttgcaaaaaaatgcatttgactcgcatttgaaagtcaatgatgttgaaagggacatttaccccaaagaggacaaaggaatgagtgagatagtaatacgccacgcagaaacacgggattacgaggccatcaggcagattcacgcccagccggaggtgtattgcaacacactacaggtgcctcatccttccgatcatatgtggcaggagcgactcgccgatcgtcccggcatcaagcaactcgtcgcctgtattgatggagacgtcgtgggccatctcaccattgacgtgcaacagcgcccacgccgcagtcatgttgccgattttggtatctgtgtcgactctcgttggaagaaccgcggcgtcgccagcgccctgatgcgagagatgattgaaatgtgcgacaactggttgcgggtagatcgcattgaactaaccgtgtttgtcgataacgccccggcaattaaggtctataaaaaatacggctttgaaattgaagggactggtaagaagtacgcattgcgtaatggtgaatatgtcgatgcatattatatggcgcgggtgaagtaagatagtgccctttttctgagatggaaaaagggtgtcattcaaaatcgacataccttcctttaaggtatttatttgcccaatacatatattgagatttaactcataattacttcctaaagtgtaatattttattttttaatatatacgcctacaatttcctggagtaaataaataacaattaacaagcataatattgccattgataaaatagcatgccataaaaggacttttcagggatgagtaatattgtttacctgacagtaacgggagaacaacaaggaagcatctccgcaggttgtgggacttctgagtctacaggtaatcgttggcagagcgggcatgaggatgaaacatttacattctcactcttaaataatattaataatacggggcttggttcacagttccatggtataacattttgtaaattaattgataaaagcactccattatttattaattccattaacaataatgaacaattatttataggatttgacttctatcgaataaatagatttggtagatgggaaaagtattattatatacaactaagaggcgcttttttatcggctattcatcaccagatcattgaaaaccaactggatacagaaaaaataactattagttatgaatttatcctctgtcaacatcttatcgcaaataccgagttcagctatttggcactccctgaaaattataaccgtttgtttttaccaaattcaaaaaaccaaacaaataatcgtttcaaaacgttaaacagcaaagctattggcaggctacttgctgctggtggcgtatacaatgggaacattgaaggattcagagatactgcggaaaaactgggtggagatgcaataaaaggctatgatcaaatactaaatgaaaaaacagcgggcatagcgatagcaacagcatctattcttttaacaaagcgttctaatgttgatacatatacagaaataaatagttacttaggcaaacttagaggtcaacaaaaacttcttgatggtatagacataatagaaataatatacattaagagaccttcaaaagacttagctaacttacgaaaggagtttaataaaactgtaagaaaaaattttcttatcaaacttgcaaaaacctccgaagcatctggaagattcaacgccgaagaccttttaagaatgagaaagggcaatgttcctctaaattataatgttcaccataaactatctctagatgatggtggtactaatgatttcgaaaatttagtattaatcgaaaacgaaccatatcataaagtttttactaacatgcaatcacgaatagctaagggaatattagtaggtgaaagcaaaatcactccctgggccattccatctggctcaatttatcctcccatgaaaaatattatggaccacacaaaatgatgactaaaacccaaataaataaattaataaaaatgatgaatgatttagactatccatttgaagcaccgctcaaggaatcatttattgaaagtataatccaaatagaatttaattctaattcaactaattgcctggagaagttatgtaatgaagttagtattctttttaagaatcaacctgattatcttacttttttaagagcaatggatggattcgaagttaatggattacgattatttagcctctcgattccagaaccttcagttaaaaacctttttgccgtaaatgaattttatagaaataatgatgatttcataaaccctgatctacaagaacggttagtgatcggggatgatagcatttcaatatttacttatgacattaaaagtaacttttttgaaattagagataatattggcacagaaaatatattcagttcgtttagtgatttctcttcattcttaaacgaaatcatggacagttgttcataataatcaaaaggaaacaaaaatcattgtaaaccatgccatctttttagagattaccagcagaaaattccttgttcgaaatttagcagtgcaagctatggaaaaacttacaacggaactacactccttaagtgagatggaccgaagacatgtagtctctattttagccgaaatagctaatggctatgatgattttaatgacatgttgatttatttagaattttacccgaatcataagattctgatatcttaaataagaaaatcccgttcgacgttctgaaaaagaaatcataaaatattagcagatacttatttcgtgactatatcttatccgatgaacttttttcaaaaccagcatttaataatatctttgacgaagatgaacgcgtctttgctcaatgtatcacacaggaataataatataacactcaacaataatatttattataattatgattacttatcacgacgcattcgcgaaagcgaaccattaccttgatgatgcagatctcccggtcgtcattactctacatggacgctttagccagggctggtatttctgtttcgaagcacgagaatttctcgaaactggagatgaggccgcgcgcttagctggtaacgcaccttttattattgataaagacagtggtgaaattcattctctgggaacggcaaagccgctggaagaatatctacaggattacgaaataaaaaaggctaccttcggcttgccctgacaaaatagccctcttcccacgaagagggccgctaaccttagtaccccgccgttaaatcatccaccgagcgcgggtcggatgcgccgtacaactcaccgtccggcccaaccataatgctttgtgtactgcccatcgcctctttcagcgccactttctgaccttttgcttccagcagcttgagcgtatccgggctaaaccctttttcgacacgcagctcgtccggcaaccactgatggtggaaacgcggcgcattggtcgcttcggcgacgttcatgccataatcgatgctattcaccaccatttgcagcaccgtggtgataatccggctaccgcctgggctaccggtaaccagccaggttttaccgtctttcaccacaatggtcggcgacatcgacgacagcgggcgtttgttcggcccgacggcgttggcatcaccgcccaccagcccgtaaacgttcggtacgcccggtttggcggagaaatcatccatctggttattaagcagaataccgctctcgcccgcgacaatacccgtaccgaaggtggtgttcagcgtataggtcaccgccaccgcgttaccgtctttatccactacagagtaatgggtagtttgattactctcataaggcgcaagcttgccagggcgaatctcactggacggcttcgctttgttgatatcaatttgatcggcaatggatttggcataggctttattggtcagtgcctgccacgggactttgacaaaatccgggtcgccaagatattccgagcggtcggcgtaggcgtatttctccgcttctgccatgatttgcatcgcatcggcgctgccaaagccgtatttcttcatatcgaagttttccagaatattgaggatttgtacgatatggatcccgccggaggatggcggtggcatggagtaaacctgatacccgcgataatcgccgcttatcggagtgcgttcgaccgctttataagccgctaaatcttctttagtgatcaagccaccgtttttctgcatctcctgggcgatctgttccgcaatcgtgcctttatagaattcgtccgggccgttttcagcaatcatctccaggctctttgccaggttcgcctgcaccagcgtgtcgccctttttcagcggctcgccctctttccagaagatagctttactgttttcgtgattcggcaacacttcgctaccgtaggttttgagatcgtcagccagcgcgtcgttaacgataaaaccatcgcgtgccagtttaaacgcgggctgcacgactttgttcagcggcatggtgccgtatttatccagcgccagcgagaaacctgctaccgtacccggtgtgccggaagccagatgcgaagtgagtgattttttgctgtccgggttgccctgatcatcgaggaacatatcgcgggtcgctttggcgggtgccatttcgcggaaatcgatagccgtggtattgccatttttcgagcggattaacataaaaccaccaccgcccagattccctgcctgcggatgcgttaccgccagcgcgtagcccaccgccacggcggcatcaacggcattcccgccctccttgaggatatccacccccacctgagtggcagtggcgtccacagacgctactattccctgtttcgcgcgtaccgggtggaagacatcttcctccacaccatacgagacgggcggcgcaggaggcgcggcggcggcgctaaaacaacttcctgagagcagagcagcaatggccacccggcgtaaaaacgtcggttttatcatcgttattctccagagattaaggggcaaccccagctaagcctggtatataactctgaattaatcatcgttttgtcgggaagcgagtaaacttaaaggatatcttcagaggaggatacgcgatgaaacgacttctgattcttacggcactcctgccgtttgtcggctttgcacagcccattaatactctgaacaaccctaaccagccggggtatcagatacccagccagcagcggatgcaaacccagatgcagactcagcaaatccagcaaaaagggatgctgaatcagcaactgaaaacgcaaactcagttgcaacagcagcatttagaaaaccagataaacaataattctcagcgggtgttgcagtcacagccgggggagcgaaatcccgcccggcagcaaatgctgcccaacaccaacggcgggatgttaaacagcaaccgtaatccggatagttcgttgaatcagcagcatatgctgccggagaggagaaacggcgacatgctgaatcagcccagcacgccgcagcctgacattccgttgaaaactattgggccgtaaagttcggaccaatcacgtcaatcgcatcggtacagatgcaatccacgccccagcgcagcaactctgccgcgcgctggggtttattgacggtataaaccagaatccgcagtccggcgtctttcaactgcatcactcgcactttatcgagtaacttatgattgagatgaatagagacgcagcccagccgcgcggtcagttcgcgccagtcgtcgcgccactcatccagcaacaaaccgcgcggcagttccggtactgcctgttgtgcggcttctaaagcatcaatctcaaacgatgacagcagcggcggcgtcataccggcccacagttggcgtgccgccagcgccaccattttgcccgttaatggtccagtgccagtggtgggtttgatttcgatattcgccatcatcccgtgttcacgacagcgttccgccacctgcgaaagcaacggtagcggctcacctttaaacgctttgctgtaccaactgcccgcatccacgcgcagtaaatcctgccagttcagttcacccgcgacgccccagccgttgctggtgcgttcgagattgtcgtcatggagcaggaagatctcgccatctttcgataacttcgcgtcaaattcgatcatcttatgaccgtattttgccccgacgtcgattgccgccagggtgttttccggggccagcttaccgccgccacgatgagcgacgatgcggggataaggccagttactcatactcgttgtcctgtttcaccatcaaaaagatgcagctgattttccgccagatgcagccacagcgtgctgcctgccgtcgggcgctcctgatgcgccagtcgcaccaccagcttctgctcgccccagcgtccgtgcgccaggttatctgcgccgaggatctccagcgtgtccatcaccatcggtacgccgccttctgcctgcgagcttagcgcaatatgttccgggcgaatgccgagagtcattttacgcccggcatactgacggtagccaccgtttagcggcagctcaataccgccgtccagttcgaaatgcgtgccttcgttattcacgcggcctgtcagcaggttcatcgccggactgccgataaaactcgctacaaacaggctggcgggcttttcgtagacttcaactggtgtgccaatctgttcggcaacgccgccgttcatcaccattactcgctgggcgagcgtcatcgcttcaacctgatcgtgagtaacgtagagtgaagtcgttttcaggcgacggtgcaactgttgcagttcaagacgcatctgcacgcgcagcttggcatcgaggttagagagcggctcatcaaacaggaacaccgccggatcgcgcacaatcgcgcggcccatcgccacacgctggcgctgaccgccggaaagctcgcgcgggcgacgtttgagcagaccgtccagctccagaatgcgcgccgcttctttaacgcgctcggcaatttgctgcttgcccatgccgcgaattttcagcccccacgccatgttttcttcgacactcatatgcggataaagcgcgtagttctggaacaccatcgcaatcccgcgatcttttggctccatttcagtcacgcgctggtcgttgatccagatatcgccttctgtcacccgctccagcccggcaaccatgcgcagcagcgtcgatttcccgcagccagacggcccgaccatcacgataaattcgccatccgccacatcaagggtcagcggtttaatgacctgggttttaccatcccagcttttggttactgcctgtaatttcagtcctgccatcttatttctcactatcgaccaggccgcgcacgaaggcacgctgcatcactaaaacaatcaccaccggagggataagcgttaacaacatcgccgccatcactgagttccattccgtggtgccttcgcctgtagcgatcatccctttgatccctgccacggtggtgccgagatccacatcggtaataatcaacaacggccacaaatactgattccagccgtagataaaggtgatcacaaatagcgccgccagattagttttggagagcggaaaaacgatgtcgcaaaagaagcgcattggcgatgcgccgtcgatccgcgcggcttccaccagctcatccggcagcgtcataaagaactggcggaacaggaaagtagcggtcgccgaggccatcagcggcagcgttaaaccggcgtagctgtcgagcatctgcaggttggcgatgacttccaccgtcgggaagatacgtacttcaaccggcagcatcagggtgataaaaatcatccagaagaagaggttacgtagcggaaaacgaaaccagacaatggcaaatgccgagagcatcgagacggtaattttgccgagcgtaatgctgaacgccatcacaaagctgttaagcaacatccgccagaacggcgcgctattcgtgcctaccccgttcacccagatgttgtggatgttttccagcagatgtgtgccggggatgagcgtcatcggcgcggcatagacggcctgtttatccagcgtcgccgcgacaaacgccacgtacagcgggaagaggatcaccgcgatcccgaggatcagcatggtatggctgaatatcgtcagccacggacggttctcaatcattggtaacgcaccttgctttcaacatagcggaactgcaccaccgtcagcacgatgacgaggaacatcaacaccaccgactgtgcggcagacgaagccagatccagtccggtaaaaccttcgcggtagatcttataaatcagcgtcgtggtggcctgaaccggcccgccggacgtggcggcgtcgatcaccgggaaggtgtcgaagaaggcatacaccaggttcactaccagcaggaagaaactcaccggggcgataagcggcagcgcaatcttaaagaagcggcgaatcggccctgcaccgtcgatggctgcggcttcgatcaacgaacggggaatggattgcagcgcggcatagaagaacaggaagttgtagctgatttgcttccatactgaggcaaacaccaccagaaacattgcctgaccgctgttttgcgcgtggttccagtcgtagccgaactccgcgagaaaatgggtgatcagcccgcgaccggggttaaacaggaagatccacaatacggcggcaacggcgggagccacggcgtaaggcagcaacattaaggtttgatagaaacggctgccgcgcacgatgtactccaccagcgccgcaaagaacagcgataccagcaaaccgctgacggtgacaaaggtgctgaattttatcgtcgtccagaaggagtcgagatagtagctgtcatggaacagcgtgacgaagttatccaggccgacaaactggctggagaaaccaaacggatcgacgctttgtagcgagtaccacaacgcttcgcccgcaggccagataaaaaagataacggtgatgatgagctgcggcgcgaccagcagataaggcagccagcgcgagcggaacaccggacgggatgatgacattacggttaattcctgaactgtgccggatgcgcttcgcttatccggcctacacgcgatgccaggtcagataagcgaaacgcatccgacattacactgattaagacttcgtcgatttctcaaagcggcgcagcaactgatttccacgctcaacggcggtatccagtgcctgctgtggtgtcttcttaccggtccacacgctctccagctcttcatccacaatcacgcggatctgcggcatgttgcccagacgcagccctttggtgaacggcaacggcggcttattcagcatctgacgcgtcgcggtatccgcccctgggtttttctcataaaagccctgctcacgggtcaggtcatacgctgctttggtgattggcagataaccggttttctgatgccactcggcagcgttttctggcttcgcgaggaaatcgaggaacttcgccacaccggtatacgtttctttatctttaccctgcatcacccacaggctggctccgccgataatggcgttttgtggcgcatctttcgcatcggcgtcgtaaggcatcatgcctacgccgtagttgaatttggcgtactcgcgaatgttggcaagagaaccggaagaggcggtggtcatcgcgcaatcaccgttatagaacttctcggtggattcatccttacgaccgacgtagctgaagtcgcccttcttgttcatctcttcgagcatggcgatgtgtttcacctgctccggcttgttgaactccagcaccgcgtccgtgccgtcaaagccgttgtttttgctggcaaacggcagaccgttccaggcgctaaagttttccagttggatccagccctgccagccgctggcgtagccgcacttcatgccggaggctttcagttttgcggcatagtccgccagatcctgccaggttttcggcggttgttccgggtctaatcctgctttcttgaaggcgtctttgttgtaatagagaacgggggtcgagctgttgaatggctgggagagtaagtggcccgttttgctgtcggagtagtaaccggaaaccgtcggcacaaactgcgactcatcgaattgaatccccgcctctttaaacacgtcatataccggtttaatggctttcgatgccatcatggtggcggtgccaacttcataaacctgcaaaatagccggagcgttgccggtacgaaatgcggcaatccccgcgcttaaattctgttcgtagttgcctttataggtcggtacaattttgtaatccggattttcggcgttaaaacgttgggccagagaatccacctctttacccagttccccttccatagaatgccagaacggaatggtcgtcactgcctgtgcattccccattaacgccagtccgagcgccagtgctgaagctgtataatgtaacggtttcatcgtttatctctcttgttgtaccgaatgcgcgaattcacgcgttttatgctcgcggggtaacatgacatgctcgaattacagaaaaataacttttttgttacatttgtaagatagtaaggtgtcagaaagatgacaaggcggtgacggcgtgggtgagggaaaatgggagatggggcacggataagcggaaaaatagaaggtctgaatcaaactctacagattactcatcgtttcatgccagatgcggcgtaaacgccttatccggcctacaagatcgtgcaaattcaatatattgcaactcacccagtaggcctgataagcgcagcgcatcaggcaattttacatttgtcacctgtctcaaaggagtcttttgactccttatcaatcaacgtgttattacccgcctaaatacgcacttctcactgcttcgttcgccagcagcgcgtcgccggtatcggagagcaccacatggccgttttccagcacgtagccgcgatccgccagctttagcgcctggttggcgttctgctcgacgaggaagatagtcatcccctgctcgcgcagctgctcgatggtgtcgaaaatttgctggatgataatcggcgcaagaccgagcgatggctcatcaagtagcagcaaacgcggattgctcatcagcgcgcgaccaatcgccagcatctgctgttcaccgccggacatggtgcccgcccgctgaacacggcgctcatgcagacgtggaaacagttcatacacccactttatgcgctcctgaaactggtcacgttcggcaaagaagccgcccatcgccaggttctcttccaccgtcatccgcgagaagacgcgacgcccttccgggacaatcgctaccgcttcgcgcatgattttcgccgtctgccagtcggtaatgtctttatcatcaaacacaattcgcccgctggtggcgcgcggatcgccgcataacgtaccaagcaaggtggttttccccgccccgttcgcgccaatcagcgtgacaatctcgccctgattgatatgcaagctcacctcatgcagcgcctggattttgccgtagtgggcgctgactttgtcaaaggacaacatgactttttccatcttatgcctcacctaaataggcacggatcacgtccgggttattacggatttgctccggcgtaccgtttgccagtggcgtcccctgattgaccacataaattcggtctgaaatccccatcaccagcttcatatcgtgttcaatcaacaagatagtggtgttgtgatgattgcgcagttcggcaatcagctcatccagctctttggtttcttttgggttaagacctgccgccggttcgtcgagcattaaaatctccggctgcgtcaccatgcagcgggcaatctccagacggcgttggtcaccataggccaggttactcgcctgacggttggcgtgttccagcaaaccaatgcgctcaagccaggtggcggcgcggtcgagcgcttcgctctgggcgcgacggaaagaaggcgttttcaacaggccagagaacagcccggttttcagttgctgatgctgcgccaccagcaggttttcaattaccgtcatttcacggaacagacgcacatgctggaaggtgcgcaccacgcccatgcgggcaatttgctgccccggtaaaccttcaagatgctgatcgcgcagtaaaatggtgccgccggtgggtttgtagaaaccggtcaggcagttaaaaaccgtggtttttccggcaccgttagggccgattaacgagacgatttcctgcgggtacagttcaagattgacgttgttcaccgccagcaggccgccgaagcgcatcatcagaccgttaacagataataatggctgactcatgcctgctctcctttcgctgcgccgtttttcagcttcagttgcgggcgcgtcatgggcagcaagccctgcggacgccagatcatcatcagcaccatcaaaccaccgagcattaacatgctgtattcgttgaaatcacgcatcaattcgcgcgacaccaccagcaaaattgccgccagaatcaccgcaaattgcgagcccataccgccgagcaccactatcgccagcacaaacgccgattcggcaaaggtgaaggattccgggctgacaaagccctgacgcgccgcaaacagcgttccggcaaaaccggcaaacgcggcgctgatggtaaaggcggtcagcttgatacgacgcgggcttaagcccagcgaacggcaggcaatttcatcttcacgcaatgcttcccacgcacgccccagcggcatccgcagcaggcggttaatgacaaacaggcttagcaccaccagcagcaacgccaccagatacaggaagatgacgcgatcggagggatcgtatttcaggccaaagaaattactgaacgtgtcccagccgccttcacgagcggtacggctgaactcaaggccgaagaaagtcggtttcgggatctgactgattccgttcgggccgccggtaatttcggtgttattgagcagcaatatgcgcacaatttcgccgaagccaagggtaacgatcgccagataatcaccacgcagacgcagcaccggaaagccgagcaggaagcccgccgccgctgccattaacccggcaatcggcagacaagtccagaagcccaagccgtaatagtgattgagcagcgcaaaggtgtaagcgccgatggcgtaaaagccgccgtaccccagcaccagcagaccagaaagaccaacaaccacgttcagcccgagaccgagaataatgtagatcatggtcagggtggcgatatccaccgtcccgcgcgacaccataaacggccacgccaccgcaagcaccagcagcgccacgaggaacagcttttgcttcaccgtggagccatcaattgcaggcagaataaacttcggtccggaaacgcttttcagccctttctggaaagcaggtcgcaaaagctgaaagaaaaagaccaccgccgtgccgataaacacccactgccaacggatgtctgaagccgtgtcgaccaccagtttggtgccatccagctccagttgtacgcccataaagacgcccgccaggacaaaaaacatcgcggcagagagcaacgccattgcaatatgcatcggtttcatactttctctacctccgggcgacccagaataccggtcggcatcaccagcagcaccagaatcagcagggcaaatgaaaccacatccttatattccgtactcagataggcagaagagagcgcctccgcaatccccaagatcagcccgccaatcatcgcccctggaatgctgccaatcccaccgagcaccgcagcggtaaaggctttcatcccggccataaagccgatataggggttaatgacgccatagaactgaccgagcagtacgccagccactgccgccatcgccgcgccaataacaaaggtcaaagcaatcacccggtcggtgttgatgccaagcaggctcgccattttcagatcttccgcgcaggcacgacaggcgcgccccatacgggaatagcgaatgaaaatcgtcagcgccagcatggcgaggaaggtgacaatccagatcaccgcctgcatggtggtaatagaggcagagaagttttcgctatggcccaccacccactgaccgttaaacaggctgggcagcgccacatcgcgcgaaccttcggtcaggctgacgtagttttgcaggaagatggacataccgattgcggaaataagcgcaatcaggcgcttagaattacgcaccgggcggtaagccacccgttcgatactccagccgtaggcgctggcaatgacgattgcgccgacgaatcccgccgccaccagcagccagccggtatcaatgcccatcatcatcagcgcggcgatgatcataaatgagacgtagctgccaatcatataaacctcgccgtgggcgaagttgatcatgccgataatgccgtaaaccatggtgtagccgatggctatcagcgcgtaggtactgcccagcgtgacgccgttaaacatctgctgcaagaaatacaaaaactgctcagacataaggtaacctttctaaacccgcccgcattttacgggcggtgggatgatcacttggctgccgtggatgaaccgtcggcgtgccactggaagacaccaaaatcaaatcccttaagatcgcctttttcatcccagttcagcggcccaatcacggtgtttgcaccgttagcttttaaatctttcaccagcgccagcggctcatcgctgccagtacgctcaagggcagtcgccagagattgcaccgccgcgtaggtgatccagacataaggcccggacggatctttcttgtctgctttcagcgcatcaacgatgccctggtttgccggatcctggtcatagcgttttggcatagtgaccaacatgccttcggcagcatcaccggcaatattcgacaatgatgcgttacccacaccttccggccccataaactgagttttcaggccaacggaacgggcctggcgcagcatctgccccatttccgggtagtaaccgccgtagtaaacgaagtcgatgttttcttttttcaggcgggcgatcagcgcggagaaatctttctccccggcggtaatgccgtcgaagaagacgacgttggcgttagccgctttcagcccgtcctgcaccgaacgcgccagcccttcgccatactgttgtttgtcgtgaatgatggcgatgcgctggggcttcaccgtctcaagaatgtattttgccgccgttggcccctgggaagagtccagcccggcagtacgcatgatgtgttgataaccgcgttgggtcagttccggattggtcgctcccggcgagatcatcagaataccttcatcttcatagatatctgacgcaggttgagtagaagaagaacacagatgaccaataacgtatttaatgccgtcattaacgattttgttggcgaccgcaacggcttgtttcgggtcgcaggcgtcgtcatattccacgccaaccagcttgtcgcccttaattccccctttggcattaatgtctttaatcgcctgacgcgcgccgttaaattccatatcgccccactgggcaatcgggccggacatcgcgccgacaacggcgactttaatatcgtcagccatagcggtgtgtgaaattgccagtgcaatcatccctgcgatgatagtttttgcattccgtttcatagtcaaaaatccccattcgtgatgttgtgttgctttgtttttatgtgttaacaaatcagactgttctttttttatactgcactgtttttacctgtctgattaaggggttagcgcagtattttgtgatgatagcgattaaaatccatatttttcagtcgattaagaacagataatattctgaatttattgatagataaacagaaaaaggtgcctttgtcagcataaaataacggcacaaagagcggaataattcactaccattcaggggattatgctggacatttttcattctctaatgttttaactttgtaattattgctgttaaaaaattaatcacctgccaaaagaaataaaaaagagaaagcctccgattaaattatttcgctacactggttccacttttgtgatttacacgggttacccatgaagctgaccatcattcgattagaaaactttagcgaccaggaccggattgacctgcaaaagatctggccggagtattccccttcctctttacaggttgacgataaccaccgtatctacgccgcgcgttttaacgagcgcctgctcgctgccgtacgggtaaccttaagcggcaccgagggagcactggattccctgcgtgtgcgggaagtcacccgacgtcgcggtgtggggcaatatctgctggaagaggttttgcgtaacaatcctggcgtttcatgctggtggatggcggatgcaggcgtggaagatcgcggtgtgatgacggcgtttatgcaggcactgggatttacggcgcaacagggcggctgggaaaagcgttaatcgtcaagtttgatttcaaaagtgatgaccaacgagaaattgcctgatgcgctacgcttatcaggcctacaatgtgtgctgcaatttactgatttctttggatcttgtaggccggataaggcgtttacgccgcatccggcatgaagcaacgtactcgatattagcaatttggcggcaacccaaagttgccgattaatgattacttcgcatcggtcgccgtgccgttggcgtgccagtcaaatacgccgaactcaaagcctttcagatcgcctttctcatcccacgtcagcggtcccattacggtatccacggagttcgctttcaggtatttggcgatttcagccggatcgtcagactgattcaggcccgcctgcaaagattgcagcgcggcgtaggtggtccagacgaatgcgccgcttgggtcctgttttttcgctttgatcgcgtcaacaatgggtttgttcgccggaacctgatcgtagttcttcggcttggtcaccagcagcccttccgctgattcgcccgcaatgttagacagcgaaacgttagccacaccttccggccccataaactgagttttcagccctgccgcgcgtgcctgacgcaggatttgccccatttccgggtgataaccgccgtagtaaacgaagtcgatattctcttttttcagacgcgccaccagcgttgagaaatctttttccccggcggtgataccatcaaagaacaccacgttagcattgcctttcttcaggccgtcctgcaccgctcgcgccagaccttcgccgtattgctgtttgtcgtgaacgatagcaatacgctgcggtttcactttctcaagaatatatttcgccgccgtcggcccctggtcggagtccaggccggtggtgcgcaggatcagctgatagctacgggcggtcagctccggcgcggttgccgctggggtgatcattaaaatgccttcgtcttcgtagatatcagacgcaggctgcgttgatgaagaacagaggtgaccaatcacgtatttaatgccgtcgttaacgactttgttcgccaccgcaaccgcctgtttcgggtcacaggcatcgtcatattttacgatttgcagtttgttgcctttaatgccgcctttagcgttgatatccgcaaccgcctgctctgcgccggtaaactcctggtcaccgtactgggccaccggaccggacattgcgcccacgaccgcgactttaatatcttctgccagagccatattgctgaatgccagcgcgatacatcctgccagtaacgctttaccctttatgttcatcctgagaatccccattcttctggttattacgtgtgttgtgatgttgttgttcagcactttatttcgttttatgcatgactacccgtgctttagcagcatactctgctaaaacatacccgatttttatgatattggaatagctattttgacagtttattaacaatctgcgtggggattggcgttttgccggaggggaaattgattattacagaggcccaaaaaacaaaaaccccggactcgcatccagggttctctgcttaatagcggaaattacgcttctatagcagcacgcaattttttcatcgcgttcttttccagctggcgcacacgctcagcggaaacgccgtaacggtcagccagttcctgcaacgtggacttgttgtcttcgtccagccagcgcgcgcggatgatgtcctggctacgctcgtccagaccttgcatcgcgtcggtcagacggtttgccgcctgctcttcccagttatcatcttcgatgccgtcggcaaagttagatgatttatcctgcagatagagcaccggtgccatcggctggctgtcggaatcgtcgtcggaagacaggtcaaaggtcatgtcctgtgccgccatacgtgattccatctcacgaacgtctttgctggttacgcccagttcacgggccaccatttcgacttcatcctggttaaaccagcccagacgctgcttggttttacgcaggttgaagaacagtttgcgctgcgctttggtggtcgcaactttgacaatacgccaattacgcaggacgtattcgtggatctctgctttgatccagtgaacggcgaaggagaccaggcgcacacccacttccgggttaaaacggcgcactgctttcatcaggccgatgttaccttcctgaatcaaatccgcctgtggcaggccatagcccgcataattacgagcaatatgaacaacaaaccgcaggtgagacaggatcagcgttttagctgcttccagatcgccatggtaatgcagcttttcagccagcgcccgctcctcgtcagccgacaacatcggccacgcgttagctgcccggatgtaggaatccaggttgccaactggggctaaagctaaactttgcattttgtcagtcattcaaatcctctcaatcgatatcttctggcgcttcagtggtagcaacaactgtgccagagcttaagagcaacgaggttatcattcactgttttatcagaccgtgattttatccacaagttcaatgcaagcttgtgaataaattacgcacaaaatgtgacatagagatgaaataccgggaagagacaacggggtctctttccctgctacggaacccattgcagggaaagagtataacacgcttttattattcaggcgtaaagtggcgtaaatgttgtaccgtggcaagccacgctgccacccagccaatcatcgagcataccagcagcaatagcaggcattcatcgaacgataagccattgatatcaaacttcgttccgaaaacctgtgccacttccgcaaccgccgatgacaatcgcagtaccagaatttctgacaaaattagtgacaacaatgcgccagaaaaccccagcaatgcgccaccgtacaggaacgggcgcaggatgaaaccatccgttgcaccaatcagtttctgcacgttaatggagtcacgacgagcaaagatactcaggcgtacactgttaccgatgacgaggaacactgccgccaccatcaacacgccgatcatcgccgaaacgcgcccgaccagcccggtcaacgccgccagacgggcaaaccagctgtcatccatccgcacttcgtcaatgccgttaatctgcgtgatacgatcacgcagcgtattcagagactccgtaccctggaaatcgagtttcgggatcaccaccgccactgccggaagcgggttttcttccagcatatccagcgcaccaccaaaaccagaccagttacggaactcacccagtgcgtcttcacgagaaagataattcactttctccacgccttgctcggcctgcaactgtgccaccacacccgcagcggcgtcatcgtccagcgttttttgcagataaacagtgatttgcggtgacggataatactgcgtcgccgcctggttaacgtttttgtacaccatataacagacgctgggcagcgtcagagagatggcgataaccatcaccgttaaaaacgtggcgaacggtttgcttttcagatcctgcaatgcgccgtggaaggcatagcgcacctgttcgttgaaaacgttggttttgcgatttaccggttttggcgaggatttcgcgcgtttcggtgcgttacgaccgccgtcgccagagccaccgaccgatttacggaagcgatccagacgcccgccaaactgccgaatatgattgattgcatcgcgcttattcatggcccacgcctccatgcaagtgaccatcgctcagggtgagcatgcgataggaacgccgtgaaatcaggttgatgtcgtgcgttgccatcaatacggttaccccaacgcggttaaactcttcaaacagacgtagaatcccttccgacaacgcgtcgtccaggttaccagtcggttcgtccgccagcagtaccgcgggcttgttcaccaccgcgcgggcaatgccaacacgctgttgttcaccgccagaaagctgaatagggaagttcttcgctttgtccagtagcccgactttatccagtgccgccgacacccggcgacgaatatcgtcaccgctggcaccagcgataatcagcgggatcgccacgttatcgtagacagtacggtccatcagtagatggtgatcctggaaaatcatgccaatctggcggcgcagaaacggaacttcacggtttttcagacgcgtgatgtcatggccgctaaaccagattttcccggcgctgggccgctcaatcccacagatcagcttcaggagggtacttttccctgcgccggaatgaccggtcagaaacgccatctcacccggctgcatatggaacgtaacgccctgcagcgcctgtctcccaccgagataagccttgctgacatgttcaaagcgaatcattgttaatcctctcgggcaaaaagtgcctctataaagtcgtccgccttaaacggacgcaaatcctcaatacgttcgccgacaccaatgtagcggatagggataccaaactggtcagccaccgagaaaattaccccgcctttcgccgtgccgtccagtttcgttagcgtgatgccggttaagccaacagcttcgtggaacagtttggcctggcttaccgcgttctgcccggtgctggcatcaatagtcagcataacttcatgcggcgcttcaacgtcgagtttcttcatcacgcggacgattttcttcaactcttccatcagatgcgatttgttctgcaggcgtccggcggtatcggcaatcaggacgtcgatgttacgcgctttagcggcctgaatggcgtcgaagataacagaagcggaatccgcaccagtatgctgggcaatcaccggaatattgttgcgctgaccccagacctgaagctgttcaaccgctgccgcacggaaagtatcgcctgccgccagcatcaccgatttaccctgctgctcaaactgacgcgccagcttaccaatcgtcgtggttttacccacaccgttgacgcccaccatcaggatcacgaacggcgttttaccttcaacattcagcggctcatcgactttcgccagaatctcgcccatctcttctttcagcaggccatagagcgcctcggcatcacgaagctgcttgcgggatgcgccttccgtcagattggtgattattttacgtgtggtttccacgcccacatcggcgatcaacagctgttcttccagctcttcaaacagatcatcgtcgatttttttaccgcggaacaggctgataaatccggaaccgagattttctttggtttttaacaggctgcgtttcaggcgcgcgaaaaaaccttctttggtcggtttttcctgctcctgagcgatttcttccaccggctgctcttcttctgccggaggaaccaccatcaccgcctcttctgccgcttcggcagccagcgcctgtgcttccagctcttcgtcggtgatttcttctttagccgcttcttcttccgccgcttcgacaatctctacggtttccgcttcagcctgccactcttctggcgaaacctcttcggcgttgacgtcttccggcaacggcagctcttcacgttcgatagccactggctccggcgtttcttctacgaccggttccggctgtgcaacgacttccgcttcaggctgcgctttttcactttcagcaacctgttcagtgacttccacaacgtcggcagcaaaagtttccgcctcggcttcagtatgcgcctgcggctgctcttcaacggcttgttccgaagccttcacaggttcttgcgcctgaacgatttcttctacaaccggttgttcattctgaacttctgtctctttttccggggtctgctctttttgaccaaagcccagccaggaaaaaaagccacgttttttttctttcgccatttgcgactacactcctcgctgttgcttcatggcacagcgttaacgctatgtacatagcagctaaaaaaatgatgaaatagtctatcacttaacttaattcacatcaccgcctgcaagtatgtgttatctggcggattgagcaatttatcatgaaaaaaccgaatcattccggcagcggccaaatccgcattattggcgggcagtggcgaggccgtaaactcccggttcctgatagcccaggtctgcgccccaccaccgaccgcgtacgcgaaacgttgtttaactggctggctccggtcattgttgacgcccaatgtctggattgcttcgccgggagcggtgcactggggctggaagcgttgtcgcgctacgctgcgggggccacgttgattgagatggatcgcgcggtttctcagcagttaattaagaatctggcgacactaaaagcaggcaatgcacgcgtggtgaacagcaacgcgatgtcattcctggcgcaaaaaggcacaccgcataatatcgtgtttgtcgatccaccattccgccgtggcttgttagaagagacgataaatttactggaagataacggctggctggctgacgaagccctgatttatgtcgaaagcgaagtcgaaaacggtctgcccactgttccagcaaactggtcattacatcgggaaaaagtggcgggtcaggtggcttatcggctgtatcaacgcgaagcacaaggagaaagtgatgctgattaatattggtcgtttgttaatgctctgcgtttggggatttttaatcctcaacctggtgcatcccttcccacgcccgctgaatatcttcgttaacgtggcgctgatttttaccgtgctgatgcatggtatgcagctggcgctattgaaatccactttaccgaaagatggcccgcagatgaccaccgccgaaaaggtacggattttccttttcggcgtgtttgaactgctggcctggcagaagaaatttaaagttaaaaaataaccttattgttcgcctacaaagctgacaaagcgcgttcctttatagctcagcgtacctttatcgcccactgtcagggcgtggtactgctgggcgtcgaggcgaaacgtctgctccattcctccgctttgcggtttgaagcttgcctcatagcgtatactggtgcctgccggagtcacttcctgctggcgcgaacggcgatcgttaatcggtttttcccgcttgttgctcaccaccaccagcttttgctggagcggagccatatcattatcagctttttcccgtcgctgttgcataaaacgaaacgatgcggcgacgacaattaagccaatgataacaataaagaaaagaggtggtttgctcatctttatccctcatcggaaaatgcggaaataagcataccctgccagttatggtgttgtcatccgtccaccctcgccactaaactggaagcaagaccgtaggcattccgcttacgaaaaaataacgaattcaaggaactaagatgctttggtcgtttatcgctgtctgtctttccgcatggctatctgtggatgcatcgtatcgtgggccaacctggcaacgctgggtgtttaaaccgttaacccttcttctcctgctgttactggcctggcaagcgccgatgttcgacgccattagctatctggtgctggcagggctgtgcgcctcactgctgggcgatgcgctaaccctgttgccacgtcaacgtctgatgtacgccatcggcgcgtttttcctctcgcacctgctgtacaccatctatttcgccagtcagatgacgctctctttcttctggcctctaccactggtgctgctggttctgggtgcgctgttactggcgattatctggacgcgcctggaagagtaccgttggcctatctgcacgtttatcggcatgacgctggtgatggtgtggctggcaggtgaactgtggttcttccgtccgaccgctccggcgctctctgcgtttgttggcgcttcgttgctgtttatcagtaactttgtctggctggggagccactatcgccgacgcttccgtgcggataacgcgattgctgcggcctgctactttgccggtcacttcctgatcgtccgctcgctgtatctctgataaaacttgactctggagtcgactccagagtgtatccttcggttaatgagaaaaaacttaaccggaggatgccatgtcgactcctgacaatcacggcaagaaagcccctcaatttgctgcgttcaaaccgctaaccacggtacagaacgccaacgactgttgctgcgacggcgcatgttccagcacgccaactctctctgaaaacgtctccggcacccgctatagctggaaagtcagcggcatggactgcgccgcctgtgcgcgcaaggtagaaaatgccgtgcgccagcttgcaggcgtgaatcaggtgcaggtgttgttcgccaccgaaaaactggtggtcgatgccgacaatgacattcgtgcacaagttgaatctgcgctgcaaaaagcaggctattccctgcgcgatgaacaggccgccgaagaaccgcaagcatcacgcctgaaagagaatctgccgctgattacgctaatcgtgatgatggcaatcagctggggtctggagcagttcaatcatccgttcgggcaactggcgtttatcgcgaccacgctggttgggctgtacccgattgctcgtcaggcattacggttgatcaaatccggcagctacttcgccattgaaaccttaatgagcgtagccgctattggtgcactgtttattggcgcaacggctgaagctgcgatggtgttgctgctgtttttgattggtgaacgactggaaggctgggccgccagccgcgcgcgtcagggcgttagcgcgttaatggcgctgaaaccagaaaccgccacgcgcctgcgtaagggtgagcgggaagaggtggcgattaacagcctgcgccctggcgatgtgattgaagtcgccgcaggtgggcgtttgcctgccgacggtaaactgctctcaccgtttgccagttttgatgaaagcgccctgaccggcgaatccattccggtggagcgcgcaacgggcgataaagtccctgctggtgccaccagcgtagaccgtctggtgacgttggaagtgctgtcagaaccgggagccagcgccattgaccggattctgaaactgatcgaagaagccgaagagcgtcgcgctcccattgagcggtttatcgaccgtttcagccgtatctatacgcccgcgattatggccgtcgctctgctggtgacgctggtgccaccgctgctgtttgccgccagctggcaggagtggatttataaagggctgacgctgctgctgattggctgcccgtgtgcgttagttatctcaacgcctgcggcgattacctccgggctggcggcggcagcgcgtcgtggggcgttgattaaaggcggagcggcgctggaacagctgggtcgtgttactcaggtggcgtttgataaaaccggtacgctgaccgtcggtaaaccgcgcgttaccgcgattcatccggcaacgggtattagtgaatctgaactgctgacactggcggcggcggtcgagcaaggcgcgacgcatccactggcgcaagccatcgtacgcgaagcacaggttgctgaactcgccattcccaccgccgaatcacagcgggcgctggtcgggtctggcattgaagcgcaggttaacggtgagcgcgtattgatttgcgctgccgggaaacatcccgctgatgcatttactggtttaattaacgaactggaaagcgccgggcaaacggtagtgctggtagtacgtaacgatgacgtgcttggtgtcattgcgttacaggataccctgcgcgccgatgctgcaactgccatcagtgaactgaacgcgctgggcgtcaaaggggtgatcctcaccggcgataatccacgcgcagcggcggcaattgccggggagctggggctggagtttaaagcgggcctgttgccggaagataaagtcaaagcggtgaccgagctgaatcaacatgcgccgctggcgatggtcggtgacggtattaacgacgcgccagcgatgaaagctgccgccatcgggattgcaatgggtagcggcacagacgtggcgctggaaaccgccgacgcagcattaacccataaccacctgcgcggcctggtgcaaatgattgaactggcacgcgccactcacgccaatatccgccagaacatcactattgcgctggggctgaaagggatcttcctcgtcaccacgctgttagggatgaccgggttgtggctggcagtgctggcagatacgggggcgacggtgctggtgacagcgaatgcgttaagattgttgcgcaggagataaggcaaaccgatcgcaacattgagcgcgatcggtcccctcgcccctctggggagagggttagggtgaggggaaaaggcggcatcgaagccaatcagcccctatcaaccgcctttacgaatcaaataacgataaggcagtccatccgtctctttagcaaccagttcgtgttccataaaggtacaaaacccaggaatatcgcgggtagtggccggatcgtcggcgataatcagcaacgtttcgccaggctgcatattgcgcacggttttgcgcaccatcatcaccggttccgggcagcgcaggccaagcgcgtcgagtgtgtggtcagggctggaaaagagatcggtcattttcttctcatcacttaaaaaaacggcgctagtttacgccctgtgagtccgtaagcaaactaggttaacgattgcgtgaaaattaaccattgcattgtcaacgtaaagcagtatcatgcggcggctcgaaaaaagggtaagcacgttattatgttaaggtaacagacgtgtcgtacgtattgggttccctcaccccaatggttaatcaaaaaggtacaatatgaacgttttctcgcaaactcaacgctataaggcgttgttctggttatcgttatttcatctgctggtgatcacctccagtaactatctggttcagcttcccgtctccattttgggtttccataccacctggggcgcgtttagctttccgtttatttttcttgctaccgacctgaccgtgcgtatttttggcgcaccgctggcccgacgcattatcttcgcggtaatgatccctgcgttattaatctcctacgtcatctcgtcgctattctatatgggttcctggcagggattcggcgcactcgcccacttcaacctgtttgtcgcccgtatcgccaccgccagtttcatggcctacgcgctggggcaaatcctcgacgtgcacgtttttaaccgcctgcgtcagagtcgccgctggtggctggcaccgacagcgtccacactgttcggtaacgtcagcgacacgctggcctttttcttcattgccttctggcgtagcccggatgcctttatggctgaacactggatggaaatcgcgctggtcgattactgtttcaaagtgttaatcagtatcgttttcttcctgccaatgtatggcgtattactcaatatgctgttgaaaagactggcagataaatccgaaatcaacgctttgcaggcgagttaaaggttcgttatcagagttgtgataagatggatgaatgagccgttatggccgtttatcgaaaggaagaagtcaatgcgcaatctggttaaatatgtcggaattggcctgctggttatggggcttgcggcctgtgatgataaagacactaacgctacggcgcagggttcggtcgcggaaagtaacgctaccgggaatcccgtcaacctgcttgatggcaagttaagtttctcgctgccagcggatatgaccgaccagagcggtaagctgggaacgcaggccaataacatgcatgtctggtccgacgccaccgggcagaaagcagtcatcgtcatcatgggcgatgatccgaaagaagatctggcggtgctggcgaagcgtctggaagatcagcaacgtagccgcgatccgcagctgcaagtggtaaccaataaagccattgagctgaaaggtcacaaaatgcagcagttagacagtattatctccgcgaaaggccagacggcgtactcttccgttattctgggtaacgtgggtaatcaactgctgaccatgcaaattacgctgcccgctgacgatcagcaaaaagcgcagaccaccgcagaaaacatcattaatacgctggttattcagtaagttttaagatgatgaggcggcctcagggacgtgttccggaggccgtttttttaatcgccacgtcagtaataacgcgattgcgaccagtcccgccgccgccagataaatcaccggtacgcccgcccagctcatcaccagcccagccagtggtccagtcacgccaagcgataaatccataaatacggtgtaagttgccagcgccgccccctgattttgctgcggaaccgcttttaccgccactacacccaatgccgggaacaccagcgaaaacccggcccccgccagtaagacgccgattttcgccatccacggcatagtcgccacgccaaccagtagcaggccgattatctcaacgctaaagcaaatcatcgctacgtttaagccaccgatacggttaatgccgttagggaataacaaacgcgtaccgacaaacgcacagctaaacagcgtcagcgcgaaagccgcaccgtcccaacctttagcgtcataaaacagcgtgataaaggtggcgatgacgccaaatccggcggaagccagtgccagcgccataccgtacagccagacgcgcccaagcaccgcgcgaaacggcagcggtttgcctttactggcttttaccgtcggacgcgggatcgccaacaaaatggccaccagcgccacgcccataatgattaacgctaacgcctgcaagccgccccagtgataaaacacgacgcctaacggcgcacccatcgccatcgccccgtaagtgacaatgccgttccacgaaatcacccgcccgatatgcagcgagccaaccacgccaacgccccatagggtcgatcccgttccggcaaaactttgcccaatcccaaggatgacgcgccccaggcaaagtaataacaggctgatgacaggcagactggcggttaatcctgccgtcagataccccagaccgctcaaaaagcagccgcataaaccgaagacgacaatctttttgggtcccagcgaatcggcgtaacgtccggcatgagggcggctcagcaaggtggcgaaatattgcaggctgataaccaatcctgcccagaaggcgctaaagcccatcacatcatggacatagcccggtaatacagcgagcggcaacccgatggtgaggtagctggcgaagttaaacatgactatagagacaatgcgcaaattcaggcgcaatccgtttagcgcgggttcggctacgggttcgggcatgaggatcaccacatttttacaacagtgtttcatttttaccacgtgctgacgtgaaaatcagcagtaagaatcagaatattgctggcgtgactcccgctacacttaatacaaaaagtcacaaggaagccccaatggaaacccctcaacccgataaaacgggcatgcacattctgctcaagctggcctcgctggtagtgatcctcgcgggcattcacgcagcggcagatatcattgtgcagctgttactggcgctgttttttgccatcgtcctcaacccgctcgtcacctggtttattcgtcggggagtacaacgccccgttgccattacgattgtagtggtggtgatgctgatcgcactaaccgcgctggtcggcgtactggcggcatcgtttaacgaatttatctctatgctgccgaagtttaataaggagctgacgcgcaaactttttaaattgcaggagatgttgccttttcttaatttgcatatgtcgccggagcgaatgctgcagcggatggactcggaaaaagtggttaccttcaccacagcgctaatgaccgggctttccggggcaatggcgagcgtgcttttgctggtgatgaccgtagtttttatgctgtttgaagtgcgccacgtcccttacaaaatgcgttttgcgctgaataatccacagattcacatcgcgggattacaccgcgcacttaaaggcgtttcgcactatcttgcattgaagacgctactcagtttatggacaggtgtcatcgtctggctggggctggagctgatgggggtgcagtttgcgctgatgtgggcagtactggcgtttttgctcaactacgtgcccaatatcggcgcggtaatttccgccgtaccgccaatgattcaggtgctgctgtttaatggtgtttacgaatgtattctggtcggcgcattgtttttagtggtccatatggtcatcggcaatattttagaaccacggatgatgggccatcgcctggggatgtccaccatggtggtatttctttcattgttaatttggggatggctgctcggcccggtagggatgctactttcggtgccattaaccagcgtgtgtaaaatctggatggaaaccaccaaaggcggtagcaaactggcgattttactggggccgggcagaccgaaaagtcggttaccgggatgaggcgacaagtgatacgatacgcactttcattttccattaaacgttggccctgatatgtatcggatagttctggggaaagtttcgaccttaagcgcagctccactgccaccgggtttacgcgagcaagcaccgcaaggtccacgacgcgaacgctggctggcggggcgtgcattgctttcgcacacgctttccccgctaccggagatcatctatggcgaacaaggcaaacctgcatttgcgccggaaatgccgctatggttcaacttaagccatagcggtgacgatatcgccctgctgttgagtgatgaaggcgaagtcggctgcgatatcgaagtgattcgcccgcgcgccaactggcgctggctggcgaacgccgtattcagcctcggggaacacgctgagatggacgccgtgcatcctgatcagcaactggaaatgttctggcgcatctggacgcgcaaagaagccatcgttaaacagcgtggcggcagcgcctggcaaatcgtcagcgtagacagcacctatcactcctcgctgtcagtcagccattgtcagcttgaaaatttaagccttgcgatctgcacccctactccctttacgctcaccgccgacagtgtgcaatggatcgattcagttaactgatccgcccacccgactgcccatctattgatccagaacaggtaatcagtatgacgaatacttaaaatcgtcatacttatttccgccatctattttaatccattggggttaccatgctctccacactccgccgcactctatttgcgctgctggcttgtgcgtcttttatcgtccatgccgctgcaccagatgaaatcaccaccgcctggccggtgaatgtcgggccactaaacccgcacctttacacgcctaaccagatgttcgcccagagcatggtttatgaaccattggtgaaatatcaggcagacggttcggtgatcccgtggctggcaaaaagctggactcattcagaagatggtaaaacctggaccttcaccctgcgtgatgacgtgaaattctccaacggtgaaccgttcgatgccgaggcggcggcagaaaacttccgcgcagtgctcgataaccgtcaacgtcacgcctggctggagctggcaaaccagattgttgatgttaaagcactcagtaaaacagagctgcaaattaccctgaaaagcgcctactatcctttcctgcaagaactggccctgccccgtcctttccgttttatcgctccctcgcagtttaaaaaccatgaaaccatgaacggaattaaagcgccgattggcaccggaccgtggattttgcaggaatcgaaactgaatcagtacgatgtcttcgtccgtaacgaaaactactggggcgaaaagccagcgattaaaaagatcacctttaacgtcatcccggacccgactacccgcgcggtggcgtttgaaactggcgatatcgacctgctgtacggaaacgaagggttattaccgctcgataccttcgcccgctttagccagaatccggcttaccacacccaactgtcacagccgatcgaaaccgtgatgctggcgctcaataccgccaaagcccccaccaacgagctggcagtacgtgaagctcttaattacgcggtaaacaaaaaatcgctgattgataacgcgttgtatggcacccagcaggtcgccgacaccctgtttgccccttctgtgccctacgccaacctcggcctgaaaccgagccagtacgatccgcaaaaagcgaaagcgttgctggaaaaagccggttggacgctgcctgcgggcaaagacatccgcgagaaaaatggtcagccgctgcgcattgaactttcgttcatcggcaccgatgcgttaagcaaatcgatggcggaaatcattcaggctgatatgcgccagattggcgcagatgtctcgctgattggcgaagaagagagcagtatctatgctcgtcagcgcgacggtcgttttggcatgattttccaccgcacctggggcgcgccatatgatccacacgccttcctcagttcaatgcgcgtaccgtcacacgctgacttccaggcacagcaaggattagccgacaaaccgctgattgataaagagatcggcgaagtgctggcgacccatgacgaaacgcaacgtcaggcgctgtatcgcgacattctgacccgtctgcatgacgaggcggtttatctgcctatcagttacatctcaatgatggtggtatcaaaaccggagctgggtaacatcccctacgcgccgatcgccaccgaaattccgttcgaacagattaaaccggtgaaaccttaatgttgcgttacgtattacgccgctttctgctgctgatcccgatggtgctcgccgcctcggtgatcatttttctgatgctgcgcctcggtaccggcgacccggcgctcgattatttgcgtctgtctaacctgccgccgacgccggagatgctggcctctacccgcaccatgctgggactggatcagccgctgtacgtccagtacggcacctggttgtggaaggcgctgcatcttgactttggtatctcattcgccagccaacgcccggtactggacgatatgctgaacttcctgcccgccacgctggaacttgcaggtgcggcgctggtattaattctgctcacttccgtaccgctcggtatctgggcggcgcgccatcgcgaccgtctgccggatttcgccgtacgtttcatcgcgtttcttggcgtgtcgatgcctaacttctggctggcgtttttactggtgatggcgttttcggtgtatctgcaatggctacccgcgatgggttacggcggctggcagcacatcattttgcctgcggtttccattgcctttatgtcgctggcgattaacgcgcgtttactgcgcgccagtatgctggacgtcgccggtcagcgtcacgtcacctgggcgcgtctgcgcggcctgaacgacaaacagaccgaacgtcgccacatcctgcgcaatgcctcgctgccgatgatcaccgccgtggggatgcatatcggcgaactgattggcgggacgatgattatcgaaaacatctttgcctggccgggcgtcgggcgctatgcggtgtcggcgatttttaaccgtgactatccggtgatccagtgctttacgctgatgatggtggtggtttttgtggtctgtaatttgattgtcgatttgctcaacgccgcgctggacccgcgcattcgtcgtcatgaaggagcgcacgcgtgaactttttcctctcttcccgctggtcggtacgcctggcgctgatcattatcgccctgctggcgctgattgcgctcaccagccagtggtggctgccgtatgacccccaggcgattgatttgccgtcgcgcctgctttcgccggatgcgcagcactggctgggcaccgatcacttaggtcgcgatattttctcgcggctgatggcagcgacccgcgtgtcgctcggttcggtaatggcctgcctgctgctggtgctgacattagggctggttattggcggcagcgccgggttgattggcgggcgcgttgatcaggccaccatgcgcgtcgccgatatgtttatgaccttcccgacctcgattctgtcgttctttatggttggcgtgctcggcaccgggctgaccaacgtaattatcgccatcgccctgtcgcactgggcgtggtatgcacgcatggtgcgcagcctggtgatttcactacgccaacgcgagtttgtgctggcgtcacggctttccggtgcgggccatgtgcgggtgtttgtcgatcatctggcaggcgcggtgatcccttcgctgctggtgctggcaacgctggatatcggccatatgatgctgcacgtcgcggggatgtctttccttggcctcggtgtgaccgcgccgaccgccgaatggggcgtgatgattaacgacgcgcgccagtatatctggacccagccgctgcaaatgttctggccggggctggcgctgtttatcagcgtgatggcctttaacctggtgggtgacgcactgcgcgatcatctggaccctcatctggtgacggagcacgcacactaatgccgcaacagattgaactacgtaatatcgcgctacaggccgcgcagccgctggtacacggtgtatcgttaaccctgcaacgcgggcgcgtgctggcgttagtcggcggtagcggcagcgggaaatcattaacctgcgccgcgacgctgggcattttgcccgctggcgttcgccagacggcgggggaaattttagccgatggcaaaccggtttcgccttgcgccctgcgcggcatcaaaattgccaccatcatgcagaacccgcgcagcgcctttaatccactgcacaccatgcacacccacgcgcgggaaacctgcctggcgttagggaaacccgccgatgacgctacgcttaccgctgccatagaagcggtggggctggaaaacgccgcgcgcgtgctgaagctgtacccgttcgagatgagcggcggcatgttgcagcgcatgatgattgcgatggcggtgctgtgtgaatcaccgtttatcatcgccgatgaaccgaccaccgacctcgacgtggtagcacaggcgcgcatcctcgatctgctggaaagcattatgcaaaaacaagcgccgggaatgctgctggtgacccatgatatgggcgttgtggcgcgtctggcggatgacgtggcggtgatgtctgacggtaagattgtcgaacagggcgatgtagaaacgctgtttaacgcccccaaacatacagtgacgcgcagcctggtttccgctcatctcgccctctacggtatggagctggcatcatgactttacttaacatctccggcctttcccatcactatgcgcacggtggatttaacggaaaacatcaacatcaggcggtgctgaataacgtttccctgaccctgaaaagcggcgaaaccgtcgccctgctggggcgcagcggctgcgggaaaagtaccctcgcgcggttgctggtgggtttagaatcgcccgcgcaggggaatattagctggcgtggcgaaccgctggcgaaactcaatcgcgcccagcgtaaagcgttccgccgcgatattcagatggtatttcaggactccatcagcgccgtgaatccgcgcaaaaccgtgcgcgagatcctgcgtgaaccgatgcgccacctgctatcactgaaaaaatccgaacaactggcgcgcgccagcgaaatgctgaaggcggtcgatctcgatgacagcgttctcgacaaacgcccaccgcagttaagcggcggccagctccagcgcgtctgcctggctcgcgcgctggcggtcgaaccgaaactactgattctggatgaagccgtttctaaccttgatctcgtgttacaggcgggtgtcattcgcctgctgaaaaagctacaacaacagtttggcaccgcctgcctgttcatcacccacgacttacgcctggtagaacgcttttgccagcgggtaatggttatggacaacggacaaatcgtcgaaacccaggtggtgggagagaaattaaccttttcctctgacgccggacgtgtgctacaaaacgcggtattacccgcattccccgtgcgccgtcgcaccacagaaaaggtttaacgcaaatgcaacgagtcaccatcacgcttgatgacgatttactggagacgctggacagcctgagccagcgtcgtggttataacaaccgttccgaagctatccgcgacattctgcgtagcgccctggcgcaagaggccacccagcagcacggcacgcaaggtttcgcggtgctgtcgtatgtgtatgaacacgaaaaacgcgacttagccagccgcattgtctccacccagcatcatcaccacgacctctccgtcgccacgctgcatgtgcacatcaaccacgacgactgtctggaaatcgccgtgttgaaaggtgacatgggtgacgtgcagcattttgccgatgacgttatcgcccagcgcggcgtgcggcacgggcatttgcagtgcttgccgaaggaagattgagtctattattgggtcctttggtgaacgatcaacaaagggccactagcacacctgattcctctctaaataccctatccgaaccttctcttttgtaacgttctaaatatattcctaaaaatcttcaattcattgtgaccacaagtttttcttcgctttttcgtatgaagatactgtcattaaaataatagaaaaggattttacgatgagcggaaaaccggcggcgcgtcagggtgacatgacgcagtatggcggtagcattgttcagggttcagccggggtacgtattggtgcccccaccggcgtggcctgttcggtgtgccccggcggagtgacgtccggcagttgacttttaatcaattggtcgcaggttcgaatcctgcacgacccaccaatttaaaggtggttactggtagagaacgtgaaggataacgttgcgttagcaacggcccgaagggcgagacgaagtccagtcatcctgcacgacccaccatcctgaatgattaaagcagcataatcccgcaaggggtcgttagctcagttggtagagcagttgacttttaatcaattggtcgcaggttcgaatcctgcacgacccaccaatgtaaaaaagcgccctaaaggcgcttttttgctattcaggcgtctctcaatttcaattcttgaccctgatgacatactccgcgcttgctgcgtaaacaactttacgtcggaggaataagacgcaaagtgtggcattcggcatctcatacgtaattcgagtgacttttccccaccattcgactatcttgtttagcatataaaacaaattacaccgataacagcgaatattacgctaatgtcggttttaacgttaagcctgtaaaacgagatggtaagatgagcgtaatgtttgatccagacacggcgatttatcctttccccccgaagccgacgccgttaagcattgatgaaaaagcgtattaccgcgagaagataaaacgtctgctaaaagaacgtaatgcggtgatggttgcccactactataccgatcccgaaattcaacaactggcagaagaaaccggtggctgtatttctgattctctggaaatggcgcgcttcggtgcaaagcatcccgcttctactttgttagtcgctggggtgagatttatgggagaaaccgccaaaattctcagtccggaaaaaacaattctgatgccgacacttcaggctgaatgttcactggatctcggctgccctgttgaagaatttaacgcattttgcgatgcccatcccgatcgtactgtcgtcgtctacgccaacacttctgctgcggtaaaagcgcgcgcagattgggtggtaacttcaagcattgccgtcgaacttattgatcatcttgatagtttgggtgaaaaaatcatctgggcacccgacaaacatctggggcgttacgtgcaaaaacagacgggtggagacattctatgctggcagggtgcctgtattgtgcatgatgaatttaagactcaggcgttaacccgcttgcaagaagaatacccggatgctgccatactggtgcatccagaatcaccacaagctattgtcgatatggcggatgcggtcggttccaccagtcaactgatcgctgctgcgaaaacattgccacatcagaggcttattgtggcaaccgatcggggtattttctacaaaatgcagcaggcggtgccagataaagagttactggaagcaccaaccgcaggtgagggtgcaacctgccgcagctgcgcgcattgtccgtggatggccatgaatggccttcaggccatcgcagaggcattagaacaggaaggaagcaatcacgaggttcatgttgatgaaaggctgcgagagagggcgctggtgccgctcaatcgtatgctggattttgcggctacactacgtggataacgaataataaggcgtaacgttacgctttgggggaaagatggatttttttagtgtgcagaatatcctggtacatataccaataggggcaggcggttatgatctctcatggatcgaagcggtaggcacgatcgccgggttgctgtgtattggccttgccagtctggagaagatcagcaactacttctttggcctgatcaacgtcaccttgtttggcattattttctttcagattcagctgtatgccagcctgctattacaggtgtttttctttgccgcgaatatttacggttggtatgcgtggtcgcgacaaaccagtcagaacgaggcggagttgaaaattcgctggttgccattgccgaaggcactcagctggttggcggtttgcgttgtttcgattggtctgatgacggtatttatcaatccggtgtttgcatttttgacccgcgtggcagtcatgatcatgcaagcattaggattacaggttgtgatgcctgaactgcaaccggacgctttcccgttctgggattcatgcatgatggtgttatctatcgtggcaatgattctgatgacgcgtaagtatgtggaaaactggctgttgtgggtgattattaacgtgattagcgtcgttatttttgcacttcagggcgtttacgccatgtctctggagtacatcatcctgacctttattgcgctcaacggcagccggatgtggatcaacagcgcacgtgaaagaggctcacgcgcgctgtcccattaatggtgatgatgtgaatggccagacaccccttcattcaggtggcagtctggcccatgacaaggttgatattccatctgaatggtggcgtgctcaatctgatagtgatccatcaggtagtgttggatctgatccaacaaggcatcgtgatcgtgtggcgggatcacctgcacatgcaacgtcatcaccggcttctcgcctaccatccatacatgtacatggtgcacattgcggacttccgggatttcccggcacatacgacgcttcagttcagcgatatccagcgataccggtgcaccttcaagtaattcattcacgctatctttcaacagtcgccacgcgctacgcagaaccagaagcgacaccagtatcgagagaatggggtcagcaggtgtccagccagtccagataataatcaacgcggcaataatagccccaaccgaacccagcaggtccccgagcacatgcagtgccgctgctcgtacgttgaggtttttctcttcgctgccgtgatgaagtaaccagaaagaaagtatatttgccagcaacccagccacggcaattgccatcatcatgccgccctcgaccggacgcggcgtgcggaagcgttctatcgcctcccagacaatcaaaatggtaattaccacgagggctatggcattcacaaacgccgcgagcgtggtcagtcttagccaaccgaaagtgtggcgaatggtgggaggacgacgtgaaaattgcacggcgagtagggcgaaaagcagggcggcagtatcggtcaacatatgacccgcatcggccagcaatgccagagaaccagaaagaaaaccaccaacgacttctaccagcataaacccggcagtcacgccgaaagcatacaacaagcgacgagcattattatcttctggcaggtgtgaggacgtgtgtgagtgtgagtgcgccatgacgagtcatcccttaattattctcacttaactttatgacatcatactgcttttagaagtgaaaaattaaaagggagagactccgctctcccattattggctattttgcagggttactgcgtggtaccgtcggttttggtatcgacatcattattgatgccatcaccggtttgtacctttttattgatatccggacagcgaccatctttgcacatggtgttcttgtgctcttcatctttggtcattccgtcattgttcattgaagaaccatccgaatgcagcattgtgccgccagaaccggtatttaccccgttattgtcgacgttatttggcgcgacattttcacgggcgtcaggggctacctggcccgcatcagctgcggcgtttgcctggccgttattagtttgcgctccgctatcggcagccagtgcggcaccgctggcaaggcttagagtggcagtcagaaataatgtggccagttttgtcattttcataggatgctcctgttatggtcgttatgtcggataacctcttccaacagtgcatttgcaggtgaatataaggcattggtttaagatttcagccaggttatgaaacgcagcagagaatcttgaaataattaacaaacaaaggagttacagttagaaattgtaggagagatctcgtttttcgcgacaatctggcgtttttcttgctaattccaggattaatccgttcatagtgtaaaaccccgtttacacattctgacggaagatatagattggaagtattgcattcactaagataagtatggcaacactggaacagacatgaattatcagaacgacgatttacgcatcaaagaaatcaaagagttacttcctcctgtcgcattgctggaaaaattccccgctactgaaaatgccgcgaatacggttgcccatgcccgaaaagcgatccataagatcctgaaaggtaatgatgatcgcctgttggttgtgattggcccatgctcaattcatgatcctgtcgcggcaaaagagtatgccactcgcttgctggcgctgcgtgaagagctgaaagatgagctggaaatcgtaatgcgcgtctattttgaaaagccgcgtaccacggtgggctggaaagggctgattaacgatccgcatatggataatagcttccagatcaacgacggtctgcgtatagcccgtaaattgctgcttgatattaacgacagcggtctgccagcggcaggtgagtttctcgatatgatcaccccacaatatctcgctgacctgatgagctggggcgcaattggcgcacgtaccaccgaatcgcaggtgcaccgcgaactggcatcagggctttcttgtccggtcggcttcaaaaatggcaccgacggtacgattaaagtggctatcgatgccattaatgccgccggtgcgccgcactgcttcctgtccgtaacgaaatgggggcattcggcgattgtgaataccagcggtaacggcgattgccatatcattctgcgcggcggtaaagagcctaactacagcgcgaagcacgttgctgaagtgaaagaagggctgaacaaagcaggcctgccagcacaggtgatgatcgatttcagccatgctaactcgtccaaacaattcaaaaagcagatggatgtttgtgctgacgtttgccagcagattgccggtggcgaaaaggccattattggcgtgatggtggaaagccatctggtggaaggcaatcagagcctcgagagcggggagccgctggcctacggtaagagcatcaccgatgcctgcatcggctgggaagataccgatgctctgttacgtcaactggcgaatgcagtaaaagcgcgtcgcgggtaaggtttaattgtcggatgcgccgtcagagtggcgtatccgatgaatcaccacaggcctgataagtcgcgcagcgtcgcatcaggcaatgtgctccattgttagcaacaaaaaagccgactcacttgcagtcggctttctcattttaaacgaatgacgtttacttcgctttaccctggtttgcaaccgccgctgctttcgctgcgatctcgtcagcattacccagataatagcgtttcagcggtttgaaattctcgtcgaactcatacaccagcggcacgccagtcgggatattaagctcaagaatctcttcttcgctcatgttatcaagatatttcaccagcgcacgtaaagagttaccgtgtgcagcgatgatcacgcgctcaccgctcttcatacgcggcagaatagtttcattccagtaagggatcacgcggtcaatggtcagcgccaggctttccgtcagcggcagttctttctcgctcagtttcgcgtaacgcggatcgtgacccggataacgctcatcatctttagtcagttccggcggagtcactgcaaaaccacgacgccactgtttcacctgctcgtcgccatacttttcagcagtttccgctttgttcagaccctgcaacgcaccgtagtgacgttcgttcagtttccaggatttctcaacgggcagccatgcctgatccagttcgtccagcacattccacagggtatggatagcgcgtttcagcacagaagtgtaagcaaagtcaaagctgtaaccttcctctttcagcagcttacctgctgcttttgcttcgcttacgcctttctcagacagatccacgtcgtaccaaccggtgaaacggttttctttgttccactgactttcgccatgacgaaccagaaccagcttagttacagccatatacttactcctcaaatcatcttttaatgataataattctcattatattgccgcgacgaagcaacagcaatgcttacgcataaccatagcgaaaatagtggcgcagtgtaaggttgttgtgaatattgagttgcaaatatgtcggtgtttgctggtgatttgaacaatatgagataaagccctcatgacgagggcgtaacattactcagcaataaactgatattccgtcaggctggaatactcttcgccaggacgcaggaagcagtccggttgcggccattcagggtggttcgggctgtccggtagaaactcgctttccagagccagcccttgccagtcggcgtaaggttcggttccccgcgacggtgtgccgccgaggaagttgccggagtagaattgcagagccggagcggtggtgtagaccttcagctgcaatttttcatctgctgaccagacatgcgccgccactttcttgccatcgcctttggcctgtaacaagaatgcgtgatcgtaacctttcactttgcgctgatcgtcgtcggcaagaaactcactggcgatgattttggcgctgcggaaatcaaaagacgttccggcgacagatttcaggccgtcgtgcggaatgccgccttcatcaaccggcagatattcgtccgccagaatctgcaacttgtgattgcgcacgtcagactgctcgccgtcaagattgaaatagacgtgattagtcatattcaccgggcaaggtttatcaactgtggcgcgataagtaatggagatacggttatcgtcggtcagacgatattgcaccgtcgcgccgagattacccgggaagccctgatcaccatcatctgaactcagggcaaacagcacctgacgatcgttctggttcacaatctgccagcgacgtttgtcgaacccttccggcccgccgtgcagctggttaacgccctgacttggcgaaagcgtcacggtttcaccgtcaaaggtataacggctattggcgatacggttggcataacgaccaatagaggcccccagaaacgcggcctgatcctgatagcattccgggctggcacagccgagcagcgcctcgcggacgctgccatcggaaagcggaatacgggcggaaagtaaagtcgcaccccagtccatcagcgtgactaccatccctgcgttgttacgcaaagttaacagtcggtacggctgaccatcgggtgccagtgcgggagtttcgttcagcactgtcctgctccttgtgatggtttacaaacgtaaaaagtctctttaatacctgtttttgcttcatattgttcagcgacagcttgctgtacggcaggcaccagctcttccgggatcagcgcgacgatacagccgccaaatccgccgccggtcatgcgtacgccacctttgtcgccaatcacagctttgacgatttctaccagagtgtcaatttgcggcacggtgatttcgaaatcatcgcgcatagaggcatgagactccgccatcaactcgcccatacgtttcaggtcgccttgctccagcgcgctggcagcttcaacggtgcgggcgttttcagtcagtatatgacgcacgcgttttgccacgatcgggtccagttcatgcgcaacagcgttgaactcttcaatggtgacatcacgcagggctggctgctggaagaaacgcgcaccggtttcgcactgttcacgacgggtgttgtattcgctgccaaccagggtacgtttgaagttactgttgatgatgacgacagccacacctttgggcatggaaactgctttggtccccagtgagcggcaatcgatcagcaaggcatgatctttcttgccgagcgcggaaattagctgatccatgatcccgcagttacagcctacaaactggttttctgcttcctgaccgttaagcgcgatttgtgcgccgtccagcggcagatgataaagctgctgcaatacggttccgaccgcgacttccagtgaagcggaagaacttaacccggcaccctgcggcacattgccgctgatcaccatgtccacgccgccgaagctgttgttacgcagttgcagatgtttcaccacgccacgaacgtagttagcccattgatagttttcatgtgcgacaatgggcgcatcgagggaaaactcgtcgagctgattttcataatcggctgccatcacgcgaactttacggtcatcgcgtggtgcacaactgatcacggtttgataatcaatcgcgcagggcagaacgaaaccgtcgttgtagtcggtgtgttcaccaatcaaattcacgcggccaggcgcctgaatggtgtgagtggcagggtagccaaatgcgttggcaaacagagattgtgttttttctttcagactcatttcttacactccggattcgcgaaaatggatatcgctgactgcgcgcaaacgctctgctgcctgttctgcggtcaggtctcgctgggtctctgccagcatttcataaccaaccataaatttacgtacggtggcggagcgcagcagaggcggataaaagtgcgcgtgcagctgccagtgttgattctcttcgccattaaatggcgcgccgtgccagcccatagagtaggggaaggagcactggaagaggttgtcataacgactggtcagctttttcaacgccagcgccagatcgctgcgctgggcgtcggtcaaatcggtgatccgtaaaacgtgggctttgggcagcagtagcgtttcgaacggccaggcagcccagtaaggcacgacggctaaccagtgttcggtttcgacaacggtacggctaccgtctgccagctcgcgctgaacataatccaccagcattggtgatttctgttcggcaaaatattctttttgcaggcggtcttcgcgctcagcttcgttaggcaggaagctatttgcccaaatctgaccgtgcggatgcgggttagagcagcccatcgccgcgcctttgttttcaaaaacctgcacccatgggtacgttttccccagttctgcggtttgctcctgccaggttttgacgatttccgtcaatgctgcaacgctgagctctggcagcgttttactgtgatccggtgaaaagcagatcacccggctggtgccgcgcgcgctctggcaacgcatcagcggatcgtgactttctggcgcatctggcgtgtcagacatcaaagccgcaaagtcattagtgaaaacgtaagtcccggtgtaatcggggtttttatcgcctgtcacccgcacattacctgcgcagaggaagcaatctggatcgtgcgcaggtaacacctgtttggctggcgtttcctgcgccccctgccaggggcgcttagcgcggtgcggtgaaaccagaatccattgcccggtgagcgggttgtagcggcgatgtggatgatcaacgggattaaattgcgtcatggtcgttccttaatcgggatatccctgtggatggcgtgactgccagtgccaggtgtcctgcgccatttcatcgagtgtgcgcgttacgcgccagttcagttcacggtcggctttgctggcgtccgcccagtaggccggaaggtcgccctcgcgacgcggtgcaaaatgataattaaccggtttgccgcaggctttgctgaaggcattaaccacgtccagcacgctgttgcctacgccagcgccgaggttgtagatgtgtacgcctggcttgttcgccagtttttccatcgccacgacgtgaccgtccgccagatccattacgtggatgtaatcgcgtacgccagtaccatcttcggtcggataatcgttaccaaaaatcgccagcgagtcgcgacggcctacagcaacctgggcgatgtatggcatcaggttattcggaatgccttgcggatcttcgcccatatcgcccgacggatgcgcgccaaccgggttgaagtagcgcagcagggcaatgctccagtccggctgggctttttgcagatcggtgaggatctgttccaccatcagcttgcttttgccgtaagggctttgcggtgtgccggtcgggaagctttcaacgtatggaattttgggctgatcgccataaacggtggcggaggagctaaaaataaagtttttgacgttagcggcgcgcatggcgctaatcaggcgcagagtgccgttgacattgttgtcgtaatattccagcggtttttgtaccgattcgcccacggctttcagcccggcgaagtggatcacggtgtcgatagcgtgatcgtgcaggatctcggtcatcaacgcttcgttacgaatatcgccttcaacaaacgttggatgtttgccgcctaaacgctcgataacaggcagtacgctgcgcttactgttacagaggttatcaagaatgatgacatcatgaccgttttgcagtaattgcacacaggtatgacttccaatgtaaccgctaccaccggtaaccagaactctcataattcgctccattaggcttatggtatgaaataaccatagcataacaaagatgcgaaaagtgtgacatggaataaattagtggaatcgtttacacaagaatttagccgttttttatgcgcgattaagtgattataaaacagagggtttatgaatgattgcgctttttatctgaaaaaagacgcggtttcatgcctgcatgcgtcgaaccgttggccggagagggcgctaaggccgcctccggcaaggtcagcactaccgactcaatatatttttgtcagcacatagcgatagagtccaccgtccggcacgaactcaagacgatgggtaatacaggcaggcgcatcttcagcgtggtgcgaaacaaacaacaattgcgtttcaccttcgctaatcagcacatcaacaaaacggcggataagctggcgattcagcggatcaagcccctgtagtggttcatcgagaataagcaacgtcggatgtttcaccagtgcgcggacaatcagcgccagacgctgctgtccccaggaaagactatggaacggagcgtcagccgtgcgtttatcaatgccgagaatatccagccactgctgcaccagtttttgctggcgatccgaaacggcctgataaatgccaatcgaatcaaaatagccagaaagaatcacattacgcacggtagtgctgacccggtaatccagatgcaaactactgctgacgtaaccgatatgctttttgatatcccagatggtttcgccgctgccgcgacgtcgtccgaaaagcgtcaaatcgttgctgtaaccttgcggatgatcgccagtaaccaggcttaataacgtcgattttcctgcaccatttggcccgacaatttgccagtgttcgcctggattcacctgccagctaaggttattaagaatggggcgatcgttataagaaaccacgccattgttcagcacaatgcgcggttcgttggcgggtaaggcgtgacgtgctgaaggttcatccggctccggcagttgcacaccttcaagctgttcactatgcgccagttgcgcggcgagtgcttgttggagcagttcctctttagcgccagtttccgctaacgtgcaatccgccagcacgccagcaaactggacaaactccgggatctcatcgaagcgattgagcaccagtaccagagtaataccggactgatgtaacgaggcgagtcgctcagccagctgctgacgtgaggcaacatccaggccatcgaacggctcatcaagaatcaacaagtcaggctccgacatcagcgcctgacacagcagggtttttcgcgtctcgccagtggaaaggtatttaaagcgtcggtcgaggagggcggtaataccgaactgctgcgccagttgcatgcaacgcggtgcatcctttacttcatcctgaatgatctcagccgtagtgcgtccggtgtcatcttcgccagggccgagcatatcggtgttattccgctgccattcgtcgctgacgagtttttgcaattgctcgaaggagagacgagtgatgtgggaaaactggctttgccgttcacctttcaaaagcggaagttcccccgccagcgcgcgggccagggccgatttcccgcttccattcgaaccgacaaacgcccaactatcacccgcgtttaacgttagctgaggcaattgcagcgtttttgtgtcgctaagacgaaacgtgccttgcaaaatttgcaacgatgacattttatatcccactttgtgcagcgattactgacagggatacgtgtttcataacaaattgtcaacacgcttagcacagcgtggcgataatcacgctgtcggcattaaagtaggccgtgacattctgtccttgctgaagagaagtcgcttcatttaccggcactgtggcgcacagtgtttgcccgtcgggtagcgccattaatacttcgcactgctctgcgccgcgctcaatatgactaataatacccggtaattggttgtcagcgttttgcgcgaccgcctcgtcctgagtaatacctacccacggcgcttttagcaatatcaacacttctttgccttcatccagccccagacgcgcgccgctttgtgcggtaattgcgactttcaggcgtgtttttccgtcagccagtaagacatcaacatgctgttgaacgtcatcatgatcgcgggcggtgatggtaccgaaccactggttacgggcgctggtttgcagtgaaaaacgtgagatcgcggccagcaggctgttcagcggcagggcgtcatcgtcacttaacacatcaaaggctttttgctggatttgcgccagtaagtcatagagctgaatcagtcgctgaccatagcgggtcagtactgcgccgccgccacctttaccgcctgttgcgcgctcgaccagaatatgctcacttaactgattcatctcgttaatggcatcccaggcgcttttatagctaataccggcatctttcgctccctggctaatggaaccggaaagcgcaatgtgttttagtagcgaaatgcggcgcgggtcggcgaataatttttgttggagcttaagggtgagaaggatttcggcctgcataacaatgtcctggcaaaagtcttattgtgacggaaaacgaacgccacgcaaagctgaccgcacaaaaggggagtgcttttctgtgcttagcggttagaatagtctcatgactatatctggagttgaccatgttagagttattaaaaagtctggtattcgccgtaatcatggtacctgtcgtgatggccatcatcctgggtctgatttacggtcttggtgaagtattcaacatcttttctggtgttggtaaaaaagaccagcccggacaaaatcattgattccctgaatgcccgcttagtcgggcattttctttttctcaacttcctgcttttcctgccgatattttttcttatctacctcacaaaggttagcaataactgctgggaaaattccgagttagtcgttatattgtcgcctacataacgttacattaaggggttaccaatggctcgtaaatggttgaacttgtttgccggggcggcactctctttcgctgttgctggcaatgcactggcagatgaagggaaaatcacggtgttcgccgccgcatcactgactaacgcaatgcaggacattgctacgcagtttaaaaaagagaaaggcgtggatgtggtttcttctttcgcttcgtcatctactctcgcccgtcagattgaagcgggtgcgcctgcggatctgtttatttctgccgatcagaaatggatggattatgcggttgataaaaaagcgatcgatacagctacgcgtcagacactgctcggcaatagcctggtcgttgtagcaccgaaagccagcgtgcagaaagatttcaccatcgacagcaaaaccaactggacttcactgctgaatggcggtcgcctggcggttggcgatccggaacatgttcccgctggcatttatgcaaaagaagcactgcaaaaactgggcgcatgggatacgctctctccgaaactggccccagcggaagatgttcgtggggcgctggcgctggtcgaacgtaacgaagcgcctctgggcattgtctacggttctgacgcagttgccagcaaaggggtaaaagtggttgccaccttcccggaagattcacataaaaaagtggaatatccggttgctgttgtggaagggcataacaatgcgacagtgaaagcattttatgattatctgaagggaccgcaggcagcggaaatctttaaacgttacggatttacaatcaagtaatgatactgaccgatccagaatggcaggcagttttattaagcctgaaagtttcttccctggctgtgctgtttagcctgccgtttgggatcttttttgcctggttactggtgcgttgcacgtttccgggcaaagctctgctcgacagcgtactgcatctaccgctggtgttaccgcccgtggtcgtcggttacttattattagtttcgatgggacggcgcggatttatcggtgaacgtctgtatgactggtttggtattaccttcgcctttagctggcgcggcgcggttctcgctgccgccgtcatgtcgtttccgctgatggtgcgggcaattcgtctggcgctggaaggggttgatgtcaaactggaacaggccgcaagaacactgggggccgggcgctggcgcgttttctttactatcacgttaccgctgaccttaccgggaattattgttggtacggtactggcttttgctcgttctctcggtgagtttggtgcaaccatcacctttgtgtcgaacattcctggtgaaacgcgaaccattccttctgccatgtataccctgatccagacccccggcggggaaagtggagcggcgagactgtgcattatttctattgcgctggcgatgatctccctgttgatttcagaatggctggccagaatcagccgtgaacgggcggggcgctaatcatgctggaactgaatttttcccagacgttgggcaaccattgcctgactattaatgaaacgctgcccgccaatggcatcactgctatctttggcgtctccggtgccggaaaaacttcgctgattaacgccatcagtggactgacgcgcccgcaaaaagggcggattgtcctcaatgggcgggtactaaatgatgccgaaaaaggtatctgcctgacgccggaaaagcgtcgcgttggctatgtttttcaggatgcgcggctgttcccgcattacaaagtgcgtggcaatctgcgctacggcatgtcgaaaagtatggtcgatcagttcgataagctggtggcgcttttaggcattgaaccgttgcttgaccgtttaccaggcagcctgtccggaggcgaaaaacagcgcgtggcgattggtcgggctttgctgacagcaccggaattgctgttgctggatgaaccgctggcgtcactggatattccgcgtaaacgcgaactgttgccttatctgcaacggctgacacgggaaatcaacattccgatgttgtatgtcagccattcgctggatgagatcctccatctggcagacagagtgatggtactggaaaacggtcaggtgaaagcctttggcgcgctggaggaagtgtggggcagtagcgtgatgaatccgtggctgccgaaagagcaacaaagtagcattctgaaagtgacggtgcttgagcatcatccgcattacgcgatgaccgcgctggcgctgggcgatcagcatttgtgggtcaataagctggacgaaccgctgcaagctgcgctacgtatccgcattcaggcttccgatgtttctctggttttacaaccgccgcagcaaaccagcattcgtaacgtattgcgggcaaaagttgttaatagttatgacgacaacggccaggtggaagtggaactggaagtcggcggtaaaacgctgtgggcgcgtatcagcccgtgggccagggatgaactggcgatcaaacctggcctgtggctgtacgcgcaaattaaaagtgtgtcgataaccgcctgattaaatcaggtggctataaatgaactgggcaatgctgtcggtggtgttatcaccaatcacaatgttggcgcgcgcttttaccgcgtcatcggcgttgcccatcgccacgcctgtaccagcggcttccagcatactgatatcattaaagttatcgccgaatgccacgacgttttccatcgaccaaccttgcgcctcaacccatttcgtcaaacgtttacctttgctgttgccgccgcgtgcaatatcaacctgatcgtgccaggaccattcacactccagtcccagttcatgttcgacatgcttaccaaaatgctgcaattgcggcaggtcatcgtgcgtcagggcgaacttccatacggcgttaacttgttgcgccgtttcagccagagaagcgacttgtgtgaaagtcggacgctgttccggcggcagggtttgcgcccagttagatgtgcgaatgacatgcccggtcgggtgctcatagaccattgcatcatcgacatacatcagaccgtgaatgtggtgttcattcagcatctcaatgagttgcagggctttaataacgggcattgggtccgcttccagcacggtttttgcatgataatcatacaaataggtgccattacagcaaatagcaggtgtatccagcgccagcgcctgataaaaaggatgaatagcgacgtgatggcgacctgtgacgatgattaattgatagcctgcttcgcgagcgcgggccagggcttctatcgatgaaggaagcagggtctttttcggggtcaataaggtgccgtctaagtcgagagcaatcacgcgtgtggtcatggcgtattccagattaaggttaagaattttcgtctgcgcgaatggtacaccgataccactatcggacaaaattctgcgttttaattcagcattcaccgccaaaagcgactaattttagctgttacagtcagttgctaaatgcaaaggagcattcatgaagcaaacagtttatatcgccagccctgagagccagcaaattcacgtctggaatctgaatcatgaaggcgcactgacgctgacacaggttgtcgatgtgccggggcaggtgcagccgatggtggtcagcccggacaaacgttatctctatgttggtgttcgccctgagtttcgcgtcctggcgtatcgtatcgccccggacgatggcgcactgacctttgccgcagagtctgcgctgccgggtagtccgacgcatatttccaccgatcaccaggggcagtttgtctttgtaggttcttacaatgcgggtaacgtgagcgtaacgcgtctggaagatggcctgccagtgggcgtcgtcgatgtggtcgaggggctggacggttgccattccgccaatatctcaccggacaaccgtacgctgtgggttccggcattaaagcaggatcgcatttgcctgtttacggtcagcgatgatggtcatctcgtggcgcaggaccctgcggaagtgaccaccgttgaaggggccggcccgcgtcatatggtattccatccaaacgaacaatatgcgtattgcgtcaatgagttaaacagctcagtggatgtctgggaactgaaagatccgcacggtaatatcgaatgtgtccagacgctggatatgatgccggaaaacttctccgacacccgttgggcggctgatattcatatcaccccggatggtcgccatttatacgcctgcgaccgtaccgccagcctgattaccgttttcagcgtttcggaagatggcagcgtgttgagtaaagaaggcttccagccaacggaaacccagccgcgcggcttcaatgttgatcacagcggcaagtatctgattgccgccgggcaaaaatctcaccacatctcggtatacgaaattgttggcgagcaggggctactgcatgaaaaaggccgctatgcggtcgggcagggaccaatgtgggtggtggttaacgcacactaaccgctgatttacccggcgcagtctctcctgcgccggtgtattaacctatctcctgtaacgcgtgtctctggcgttcgacgatattggtccacaaattgtctttatcgtcagtccataaattaatcagcaaggcaaaaaagcgttctgctgctggagaaagtacggcatctttacggcgaattattcccaatgttcgacgtataacgggttccaccaatgggataccaataatcgaagaatagggcgcatgaggcattgccaggccaggaagcgccgaaatccccagtcccgcctccaccagtcctaatgacgtcgaaagatgacgcacttcgtaaaaccagtccagcttccagggcttgtcggccagctgttgttctatcaacagtcggttgccgctggaggagcgtacgccaatcattttgtaacccactaactcctgccattctacaagctgctttttggccaatggatggtcacgccgacaggccagcacgaacggctcgttgaccagtggggtaaaatcaatggatgaatttgtgacgttgttcatgtttatgccaaagtctgattcgttacacagcaccgattccatgcaattattcgtgccttgttccagaatccgcactttaatattgggatacagctcattaaatttaccgattgccagcggtaaaaaataaaatactgcggtcggaatacacgctaacgtcaccataccacgatgataagcattcatatcacgaatattaaaaagcgtttcatcgaatttctttattaattcccgcgcctccgggagcaacctttttcctgcttttgttaacgtaaccttgcgagttgtacgctcaaatagttgaatatgtaaatcttcctccatcttttttattcttcgcgttaatgcaggttgcgtaatattgagtaatttagcggcattgttaaacgaactggactctgccagtatgacaaatgccttcatacttgataattcatgcttcattattactccggaaaatggaagcgacgattttgggtggctggccgttaaaaattttaactgcatttagccaacttaaattaatgaaaaaatgttattaatcgttgagctaaagtcattagagatgctttgcccttaatgtaaccatatcgcaataagttatgtttttaaattgagggcattattatgaaaaaataccctgcgtgatgatgcgaggtggaacctcgaggggcgcgttcctgttagcggaacatttacccgaagatcaaacgcagcgcgataaaatattgatggcaattatgggttccggtaacgatctggaaattgacggtattggcggcggtaatccactgaccagtaaagtcgccattattagccgttccagcgatccgcgtgctgatgtcgattatctgtttgcgcaggtaatcgttcatgagcaacgtgtcgataccacgcctaactgcggcaatatgctgtctggtgttggggcattcgccattgaaaatggtttgattgcagcgacttcgccagttactcgcgtacgtatccgcaacgtcaatacgggtacgttcatcgaagctgatgtgcaaacgccaaatggtgttgtcgagtacgagggtagcgccagaattgacggcgtaccgggtactgccgcaccggttgcgctcactttcctgaatgccgctggaaccaaaaccggaaaagttttcccgactgataatcagattgattattttgacgatgtcccggtgacctgtatcgatatggcgatgccagtcgtcattattccggctgaatatctgggaaaaacaggttatgaattaccggcggaactggatgccgacaaagcattattagcccgcattgaatctatccgtctacaagcgggtaaagcaatgggcttaggtgatgtcagtaatatggttatccctaaacctgtgcttatttctccagcgcagaaaggcggggcaattaatgtgcgttattttatgccgcattcttgccatcgcgcgctggcgataaccggtgctattgctatttccagtagttgtgcattggaaggcaccgtcacccgacaaatcgtcccttctgtaggatacggcaatatcaatattgaacaccccagtggtgcgctcgacgttcatttaagtaatgaacgtcaggatgccacgacgttacgcgcatctgttattcggacgaccagaaaaatattttccggtgaagtttatcttccctgaaaaattcgttgtcaggataaggacaatcaataaaggacttctgtatgagtcatacagaaagaacaggattttaaatgaataagaaatcgttatggaagctaattctgatattagcgatcccatgtattattggttttatgccagctccggcaggattaagcgaactggcgtgggtgctttttggtatttacctggcggccattgtggggctggttatcaagcctttcccggaacctgtcgtactgttaattgccgttgctgcctcaatggtggtggtcggtaacttatccgacggtgcgtttaaaaccaccgccgtattaagcggttactcttcaggtaccacctggctggtgttctcggcgtttaccttaagcgccgcatttgtgaccaccggtttaggtaaacgtattgcctatctgctgattggtaaaatcggtaacaccacgctgggtctgggttacgttacggtattcctcgatctggtactggctccggcaacaccgtctaacaccgcgcgtgcgggcggcattgtgttaccgatcatcaacagcgtggcggtggctttggggtccgaaccggaaaaaagtccgcgtcgtgtcggacattacctgatgatgtccatttacatggtcaccaaaaccaccagctatatgttctttaccgcaatggcggggaacattctggcgctgaaaatgatcaacgacattctgcacctgcaaattagctggggtggatgggcgctggcagccggattgccgggcatcattatgctgctggtcaccccgctggtgatttacaccatgtatccaccagaaattaagaaggtggataacaaaaccatcgctaaagcgggccttgccgaactaggaccgatgaaaatccgcgaaaaaatgctgctcggtgtctttgtgctggcgctgctgggctggattttcagtaagtctctgggggttgatgaatccaccgtggcaatcgttgttatggcaaccatgctgctgctgggtatcgttacctgggaagacgtggttaaaaataaaggcggctggaataccttaatctggtacggcggtattatcggcttaagctccttattatcgaaagttaaattcttcgaatggttagctgaagtctttaaaaataacctggcatttgatggtcacggtaacgttgctttcttcgttattattttcctcagcattatcgtgcgttatttcttcgcttccggtagtgcctatatcgttgctatgttaccggtatttgccatgctggcgaacgtctccggcgcaccgttaatgttaaccgcgctggcactgttgttctccaactcctatggcggcatggttactcactatggcggcgcggcaggtccggtcatctttggcgtgggttataacgatattaaatcctggtggttggtcggtgcggtactgacgatattaaccttcctggtgcatatcaccctcggcgtgtggtggtggaatatgctgatcggctggaacatgctgtaaatattctcgtcatacttcaagttgcatgtgctgcgtctgcgttcgctcaccccagtcacttacttatgtaagctcctggggattcactcgcttgtcgccttcctgcaactcgaattatttagagtatatccatttattatctttctgcgcacttcacggtgcgcagatatctggagcatttgatgatcaagttatctgaaaaaggcgtgtttctcgccagtaataacgaaataattgccgaagaacatttcaccggcgaaattaaaaaagaagaagccaaaaaaggcactattgcctggtctattctctcttcgcataatacgtccggaaatatggataaacttaaaattaagtttgattcattagcctctcacgatattacctttgttggtattgtacagaccgctaaagcgtccggtatggaacgtttcccgctgccgtatgtgctgaccaactgccataactcactctgcgccgtcggcggcactattaacggtgatgaccatgtttttggtttatcggcggcccagcgttatggcggtatttttgtgcctccgcatattgcggtcatccatcaatatatgcgtgagatgatggcaggcggcggcaaaatgatcctcgggtcagacagccacacccgttacggtgcattagggacaatggcagtcggtgagggcggcggtgagttggtaaaacagctgcttaatgacacctgggatatcgactatccgggcgtggttgcggtgcatctgaccggaaaacctgcgccgtatgtggggccacaggatgtggcgctggctatcattggcgcggtgttcaaaaacggttacgtcaaaaacaaagtcatggagttcgttggaccgggcgttagcgcgctctctaccgatttccgtaacagcgttgacgtgatgaccactgaaacgacctgtttaagttctgtctggcaaaccgatgaagaagtccataactggctggcgctgcacggtcgcggccaggattactgccagcttaaccctcaaccgatggcgtactacgatggctgcatcagcgttgatttaagcgccatcaaaccaatgattgcgctgccgttccacccgagcaacgtgtatgaaatcgacacactgaaccagaacctgaccgacattctgcgtgagattgaaattgagtccgaacgcgtggcgcacggtaaagccaaactctcgctgctggataaagtggaaaatggtcgcctgaaagtgcagcaggggattatcgcgggctgttctggcggtaactacgaaaacgtcatcgcggcggcgaatgcactgcgcggtcaatcctgtggcaatgacaccttctcgctggcagtttacccgtcatcacagccggtgtttatggatctcgccaaaaaaggtgtggtagcagatttgattggcgcaggcgcaatcatcagaaccgcgttctgcggcccatgctttggcgcgggcgatacgccaatcaacaacggtttgagtattcgccacaccacgcgtaacttcccgaaccgcgaaggctctaagccagctaatgggcagatgtcagcggtggcgttgatggacgctcgttctatcgctgcgactgcggcaaacggtggctatttaacctctgccagcgaacttgattgctgggacaacgtgccggagtacgccttcgatgtaacgccgtataaaaaccgtgtttatcagggctttgtgaaaggggcaactcagcaaccgctgatttacgggccgaacattaaagactggccggaattgggtgcgctgactgacaatatcgtcctgaaagtgtgctcgaagatcctcgacgaagtgaccaccaccgacgaactgattccttccggtgaaacctcttcttatcgttcaaatccgattggtctggcggagtttaccctgtctcgccgcgatcccggttatgttagcagaagtaaagcgactgctgagctggaaaatcagcgtctggcggggaatgtcagcgagctgacagaggtgtttgcgcgcattaagcagattgctggtcaggagcatattgatccgctgcaaactgaaattggcagcatggtctatgcggtgaaaccaggcgatggttctgcgcgtgaacaggcggcgagctgccagcgtgtgattggcggtctggcgaatattgccgaggagtacgcgactaaacgctatcgttctaacgtcatcaactgggggatgttaccgctgcaaatggcggaagtaccaacctttgaagtgggggattacatttacatccctggcattaaagcggcgctggataatccgggtacgacgtttaaaggttatgtgatccatgaagatgcgccggtaacggaaattacgctctatatggaaagtctgactgctgaagagcgcgagattatcaaggcgggtagtttgattaacttcaataaaaaccgtcagatgtaaaaagcgccatgtgaatgtaggtcgcattcggcacttattgtcggatgcgatgcttgcgcatcttatccgacctacgaatcgcatcgaatctgtaggccagataaggcattttcgcagcatccggcacttattgtcggatgcgatgcttgcgcatcttatccgacctacaaatcgcatcgaaccgtaggccggataaggcgtttacgccgcatccggcaaatagttaattgctcttacttcttcgcctctgcaaccactttactacccacgccgcggttattgtattcccacatgcggttgtagttagtgtcattcagattgcgctgtatttcgtcgttatcatctacgctgccggtattacccgcaaacggacgattagagatcaccgcatcggcccacggtttagccgtgttaaaaccttcgttgatggcgctatcacggatcaccacctgaccgttggtattggcatcaacatccagcgagcggcccagttgcgccacaccatcaccgaaagcattgaaacggctgtttacggcgaggaaaccgtagtaaatgttggacagcgtagccggtgcaaacacatacgcttcttgctgagtacgtgagttcaccacgcggaattcggtgttatcgaacaccactgcgccgcgaccagaaacgatatccacatccccttcaatgtagctgttggtcaccagcgtacgcggctgacgattcgtttccagacggttctgcacaccgctgttggtgacaaagaaggtgttctgacgaccgagaatgttaacgttgttaatctgtacctggtcaccatcagtacgcagtgccaccgccggatggttacctgcatctacgctatcgcccagcgtgttttcgatggtcagattttgcagttgcaggccattgttttgtgaccagaagaccgcagagcagagaacaccgatactgtcgctgcgtttgctctggcagctatcgtacatataccacgctggtttacctggcatatatttgccgcgcgggttgacgtcgtgacgccagtcggcagggctcatgccaccatcaagggaaagcccaatcttcacatcaatcggtttttcacctgtaccgtacagagtaattccacccggagcggcagggacatataccgttccctgatactcaccaggcatcacggcaatatactggcgcttgttggtacgcttgataattgccgcatctaccgccgcctgaatcgtggtatgcgttacaccttgagtgcccgccgggccgacaacaaagtcaggttgcgcaggcagggtaatcggggaaggattccacgctgcagcacctggtgtcagggatgcaaaatagtgttgagcatcgaaattctgcgcttcttttgccgacagaatcgggcgagaagaggtaccaggcgcggtttgatcagaaggacgttgatcgggcggggttgagctacaggcggtcagcgtcacgccaaaagccaatgccagcgccagacgggaaactgaaaatgtgttcacaggttgctccgggctatgaaatagaaaaatgaatccgttgaagcctgcttttttatactaagttggcattataaaaaagcattgcttatcaatttgttgcaacgaacaggtcactatcagtcaaaataaaatcattatttgatttcaattttgtcccactccctgcctctgtcatcacgatactgtgatgccatggtgtccgacttatgcccgagaagatgttgagcaaacttatcgcttatctgcttctcatagagtcttgcagacaaactgcgcaactcgtgaaaggtaggcggatccccttcgaaggaaagacctgatgcttttcgtgcgcgcataaaataccttgatactgtgccggatgaaagcggttcacgacgagtagatgcaattatggtttctccgccaagaatctctttgcatttatcaagtgtttccttcattgatatcccgagagcatcaacatgcaatgttgttgggatggcaatttttacgcctgttttgctttgctcgacataaagatatccatctacgatatcagaccacttcatttcgcataaatcaccaactcgttgcccggtaacaacagccagttccattgcaagtctgagccaacatggtgatgattctgctgcttgataaattttcaggtattcgtcagccgtaagtcttgatctccttacctctgattttgctgcgcgagtggcagcgacagggtttgttgttatatggccttcagctattgcctctcggaatgcatcgctcagtgttgatctgattaacttggctgacgccgccttgccctcgtctatgtatccattgagcattgccgcaatttcttttgtggtgatgtcttcaagtggagcatcaggcagacccctccttattgctttaattttgctcatgtaatttatgagtgtcttctgcttgattcctctgctggccaggattttttcgtagcgatcaagccatgaatgtaacgtaacggaattatcactgttgattctcgctgtcagaggcttgtgtttgtgtcctgaaaataactcaatgttggcctgtatagcttcagtgattgcgattcgcctgtctctgcctaatccaaactctttacccgtccttgggtccctgtagcagtaatatccattgtttcttatataaaggttagggggtaaatcccggcgctcatgacttcgccttcttcccatttctgatcctcttcaaaaggctacctgttactggtcgatttaagtcaacctttaccgctgattcgtggaacagatactctcttccatccttaaccggaggagggaatatcctgcactcgcgtacccatcgacgaactgtttcaaggcttcttgggcgtcgctggcgtgcgttccactcctgaagtgtcaagtacatcgcaaagtctccgcaattacacgcaagaaaaaaccgccatcaggcggcttggtgttctttcagttcttcaattcgaatattggttacgtctgcatgtgctatctgcgcccatatcatccagtggttataacagtcgttgatgttctctgcttcgataaccctgttgaatggctctccattccatttacctgtgactcggaagtgcatttatcatctccataaaacaaaactcgccgtagcgagttcagatataatttccaccaaaggcagtagttgcttgatgctaagaattattcaatatctattcctgtaatatcttttatctttttccttgcaaagccttttgctagtgattttgaaacactcataagtgtactaattccctcatccttaaagtttgtttttatagcttgccagacatccttttgacgtaagtcagcaataaaatcatgccctcttgctgtcaacctcagtggtacttcgatccaactatatccaacaccttcccctaacgctttggacaatatatgaccgaacccaggttttccatcaaccctgactattaattcgtagtcacataataatcgcatatggaaaataaaatcttggtcatatctattaaagccattatcctctagttcactaagcatcgtgtcagggccacgagttttttcgaatgcgataagtagatcttttagatattgctggtctaatttcattgccgcctccgtgacatgtcacagagatttatatcattaattttgtttcgtgccagcctttggtcacccagcattgtgagtcaccattacacgggcatgaattaacaggaactctctcgccgcacttaccgcaccgttttctgctgatcgattttatacgccagcgcacacgtgcatcatcctggcggctcagtaacgcgatgtactcaccaaactcgcaaggcgcacgcctgaagcgacgcgtggcacagttacgctccagcatttcaatttcctgagcatcaagtacaagctccagcttacgcataccggatgatgcttgcttggctctctgatcggctttgtgctctgttgctgatttagccattctgcttttcctgcatcaggagaaagacaatcatggcggcgcggatacttccggtatctttttacgcgatattccccttcaatggcacatacaagaagagagccatcaacaggagtgattgaggaatcgacaaccagcaacgcttaattatctatagtgtcgtatttgcttcataaaatatggcgaataacacaaagcccgcagcagctcattgtgcgggcttttcttatacctacttcctagagataattctatggaggcattaaatcaatactgtcattggtaatatcatattatctaaaagtctttccacttttaacatctaggtatattctgttcgacaacgtcattcctccgcaatatgtgaaatagatgttttcacccttattgcttgatgccatccaccctccgatttccttaaaatcgctttccgtgcagaccccttcatttattaacttcctagctgccgaagaaaactcttttttgtatatacggtagtcatcagatcctttgattaaagtatcatctccgctcgcattttcagcaggatctgatggcctttcactgctaagatcactaagtttaacccattctgaaaacttgccattaacgattccattttttcttgtgcaggatttattaccttctttaatatattcgctttcccctccaacacatgaggctgaatatggctcagttatacgaacccattcaccttttttttctagaaaatctacgccttccctgaaaaatagtttcccagccactccacatttacttgaagggcaggtatgtctttccgttcgatcaacaacaacccatagttttgattcattttttgccattgccgatggtatttgagatgagacaattaacgtaagccctaaaattagtattgattttttcattgtaatttccttttactttttacaaagcgtttaatcatggctgattatctctaagtgtagtaacagccttgtgcgaaacatgttaccaaatcgccatttcagtgtatccgcagttaggctgccacttcaaggattcctaattacatggtacgtaagcgtaaaatcccgttggttggcgggtaataactctgatcaaatctcccttgtcttttgctcttacgtatgcagctcttgtgtattcaacccaggcctccagttcagcaatacgcttacttccatccgagataacaccttctactcacgctgctcgttgagttttgatttttgctgtctccagctcaacacgcagtttccccaccgttagcgcaatatcctcgttctcctggtcgcggcgtttgatgtattgctggtttctttcccgttcatccagcagtgtcagcacaatcgatggtgttaccagctcatggaaaaggtccgcgtcaaatccccagttgtcaggcattgcctgctctgccgcttcacgcagtgcctgagagtgaattacgctcacttcgaacctctctgtttactgataagctccagatcttcctggcaacttgcacaagtccgacaaccctgaacggccaggcgtcttagctcatctatgggatcgccacactcacaacaatgagtggcagatacagcctggtggttcaggcggcgcatttttattgctgtgttgcgctgtaattcttcaatttctgatgctgaatcaatgatgtctgccatcttccattaatccctgaattgttggttaatacgcttgggggtaaatgcgagcaataaaaaaggagcctgtagctccctgataattttgcttttcatgttcatcgttccttaaagacgccgtttaacatgccgattgccaggcttaaatgagtcggtgtgaatcccatcagcgttaccgtttcgcggtgcttcttcagtacgctacggcaaatgtcatcgacgtttttatccggaaactgctgtctggcttttttgatttcagaattagcctgacgggcaatgctgcgaagggcgttttcttgctgaggtgtcattgaacaagccccatgtcggcaagcataagcacacagaatatgaagcccgctgccagaaaaatgcattcagtggttgtcatacctggtctctctcatctgcttctgctttcgccaccatcatttccagcttttgtgaaagggatgcggctaacgtatgaaattcttcgtctgtttctactggtattggcacaaacctgactccaatttgagcgaggctatgtgccatctcgatactcgttcttaactcaacgggagatgctttgtgcatacagctccccgtttattatttatctcctcagccagccgctgtgctttcaggggatttctgataacagaaaggccgggaaatacccagcctcgctttgtaacggagtagacgaaaatgatcgcacctacccggatattatcgtgaggatgcttcatcgccattgctccccaaatacaaaaccaatttcagccagtgcctcgtccattttttcgatgaactccggcaccatctcgtcaaaactcgccatgtacttttcatcccgctcaaccacgacataatgcaggccttcacgcttcatacgcgggtcatagttggcaaagtaccaggcatcttttcgcgtcacccacatgctgtactgcacctgggccatgtaagccgactttatggcctcgaaaccaccgagccggaacttcatgaaatcccgggaggtaaacgggcatttcagctcaaggccattgccgtcactgcataaaccatcgggagagcaggcggtacgcatactttcgtcgcgatagatgatcggggattcagtaacattcacgccggaagtgaattcaaacagagttctggcgtcgttctcgtactgttttccccatgccagcgccttagcattaacttccggagccacaccggtgcaaacctcagccagcagggtgtggaagtaggacattttcatgtcaggccacttttttccggagcggggctttgctatcacgttgtgaacttctgaagcggtgatgacgccgagccgtaatttgtgccatgcatcatccccctgttcgacagctctcacgtcgatcccggtacgctgcaggataatgtccggtgtcatgctgccaccttctgctcagtggctttctgtttcaggaatccaagagctttcactgcttcggcctgtgtcagttctgacgatgcgcgaatgtcgcggcgaaatatctgggaacagagcggcaataagtcgtcatcccatgttttatccagggcgatcagcagagtgttaatctcctgcatggtttcatcgttaacgggaaatacaccgcacaggatgcaacgacagcacagaaagggataatccagctaagcagcgcgaccaacagcacgtctgaaacgcttgccgcgacaccaaaggcagtaaaagcagccaatgacaatgctgagaaacgtctgcagaaagatcagaacggtgcggatatccctggcaaagatacctttacgaaaaatattggtgcctgccgtgccttcggtgggtcagtaagcacaacaacaggaaactggacgactgcacagtttatcgagtggctggattctcagggagcatttaaccatccatactggatgtgcaagggttcctggtcttatggcaataataaaatcattactgatactggctgcggtaatattcatctcgccggagctgtcattgaagtaatggggataaagtcagcgatgacgatccgcattaccactccgaccacatccagcggtggcggaacaaccaacgcccagtttacctatattaatcacggaacagattattcacctggttggcgaagggactataactccagaaataagccaacggcatcagagatcggggcgctaccgtcaggtggaacagcagtatcatcagttaatctggcttcaaaaggtcgggtagccgcgctgacagacaatacgcagggggcagcaggtcttgagttatacgaggtgtataacaacggatatccaacagcgtatggaaatatcattcacctgaaagggatgacagccgttggcgaaggtgagttactcatcggctggagtggtacaagcggtgctcatgctccggcatttattcgttcacgacgggatacgaccgacgcaaactggtcgccgtgggcgcagctttacacctcggctcatcctcctgcagagttttatccagtcggcgcaccaatcccgtggccatcagataccgttccgtctggctatgccctgatgcaggggcagacttttgacaaatctgcatatccgaaactggctatagcctatccttctggtgttattccggatatgcgcggctggacaatcaagggcaaacccgccagtgggcgtgctgtattatcacaggaacaggacgggattaaatcgcatactcacagcgccagtgcgtcaaatacggatttagggacgaaaacgaccagttcatttgattacggcacgaagacagtcagtacgtttaaccacggcacaaaatcaaccaatacttcaggcaatcatacacataccgtcggttttgctgtgagcgtgcaatcaggcggtgcaaattatggtgttccgcgaagtgataaaggtgctacgactactagttcatcaggcaatcatgcacatacagtcgacattggagcacataaccatactgttggtattggtgcacattcacacactgttgccattggctcacacgggcattccattaccgtaaatgctactggtaataccgaaaacaccgtcaaaaacatcgcatttaactatattgtgaggcttgcataatgactttcagaatgagtgcagaagcacaaactatccgcgtatttaatttacttgatggaaccaatgaatttattggggaaagtgacgcatatatcccaccgtatacaggtctaccagctaatactacagatatagcaccaccagatgtggaggctggatttgtggctgtttttaacagtgagaataaatcttggaatattgttgaagaccaccgaggtaaaactgtatatgacgtaacttccggtgatgctttatttatttctgaactcggtccgttaccggaaaatgttacctggttatcgccggaaggggagtttcagaagtggaacggcacagcctgggtgaaagatgcagaagcagaaaaactgttccggatccgggaggcggaagaaacaaaaaacagcctgatgcaggtagccagtgagcatatttcgccacttcaggatgcggtagatctggagattgcaacggaggaagaaatatcgttgctgacagcctggaagaagtatcgggtattgctgaaccgtgttgatattcttgagccagtttggcctgtgcaaccacaataacggaaggatttactccttttattattgctgacttaaagccagtttcaggcgtatcgtggctgagacagataaccacccgctatgcgagtggttatgattttaacctttaacctttaacctttaatttgagattttttactttgccataaagcgtatcttttaaagaaaaagatggaacccagttaaaaccagtgcgccaggggcgtggactaccgtgaaaacacacaactgaaacactgtcaggtactttcccagttgctgattttgatgccaggtctggattgtatccaatcattgattttgttgctatatcgcatttataacttttaattgcatctggaataatgtcctgccataagtctggcttagtaacactaccgataaaaccttgatcaccccatttatcttcagttttgcattcttgcattatttgttcaggattggcagtaaattcctcccatatttttgtctttgcagaaacgggaatcatcataattgaggagttaacacggtcatgatgattaaactccctgagcatggtgaaatttttagcttttgtaaaaatatccaattttccagtaatgacaacatctatgtcaaaatataaaatgtcatgattcccgattactggatggtttgggttaaataactccatttttgaccaccaaccaggccaatcaaataacaaaggtgcagtattcacaccatcaatacttccagcatcagtcaagcagattgagggcattgaaccaaattgtttatgaagccattgtgcatgtttcggcgtaaaatccttgccgcagcgtagtacagaaacgatcaacatagaaaatctttcctaaactttcagatctaatttatacattaaatagtttgaggttatgaatactatctgaagtatacaagttattatgtgaaacaaccagaagagtgactacaatcctatgaaaacaaattgtggtagatgttggcgcgagaatacacaggcggaacaattacctgtgatgttggtgggtcgaagttgtatgaaaaatttcctgctggggataaataaagtcgcggtatgtcatgtgcgggaaggaataatcattggttttatgccgcagtacgttgtatgcaataacgtgctgcggttggctggtgaacttccgatagtgcgaatattgaatgatttccagacgttaccgattttacgacaaaaaattagcgcaagaagacaaaaatcaccttgcgctaatgctctgttacaggtcactaataccatctaagtagttgattcatagtgactgcatatgttgtgttttacagtattatctagtctgttttttatacgaaataaaatgtaatatattgatatttataacattttatgtttctcgttcagcttttttatactaacttgagcgaaacgggaaggtaaaaagacaaaaagttgtttttaatacctttaagtgataccagatggcattgcgccatctggcagagtgattaactaaacatcgcagtaatcgaggcgcttgccagagagtggaaatgaacgttaaacccgaccatcgcgccgctggcaccttcatcgacatcaatacgttctatatccagcgcgtgaacggtaaaaatgtagcgatgagtttcgcctttcggcggtgctgcgccatcgtacccggttttaccaaagtcggtacgcgtctgcaaaacgccgtctggcattgctaccagaccagagccaaacccttgcggtaatacgcgggtatcagcgggtaagttaacaactacccagtgccaccagccggagccggttggcgcatccgggtcgtagcaggtgacaacaaaacttttcgttcccgcaggaacatcatcccacgccagatgcggtgaaatattatcgccatcgtaacccatgccgttaaagacatgacgatgcggcaatttatcgccatcgcgcagatcgttactgatgagtttcatgaaccctcctttcttgtttgcagaaagtgtagccagaaaccctcacgcggacttctcgttattggcaaaaaaatgtttcatcctgtaccgcgcggttaaccgctgcggtcagacgctgcaactgttgcgggagaataatatagggcggcatcaggtaaatcagtttgccaaaaggccggatccagacaccctgttcgacaaagaatttttgcagcgccgccatattcaccggatgagtggtttcgaccacgccaatggcccccagtacgcgcacatcggcaaccatttcggcatcacgggcgggggcaagttgctcgcgcagctgtacttcaatatccgccacctgttgctgccagtcgccagattcgagaatcgccaggctggcgtttgctgccgcgcaggccagcggattgcccataaaagttggcccatgcataaagcaaccggcttcaccgttactgatggtttctgcaacctcgcgcgtggtgagtgtggcggaaagggtcattgtgccgccggttaaggctttaccgaggcacaaaatgtccggcgcgatttctgcatgttcacaggcaaacagtttcccggtacgaccaaatccagtggcgatctcgtcggcaatcagcaagataccttcgcgatcgcatattttgcggattcgttttaaccattccggatggtacatgcgcatcccgcctgcgccctggacaatcggctcaatgatcaccgccgcgatttcatgacgatgcgccgccatcaggcgggcaaagcccaccatatcgcgctcatcccattcgccatccatgcggctttgcggggcgggagcaaacaggttttctggcaggtagcctttccacagactgtgcattgagttatccggatcgcacaccgacatcgcgccaaaggtatcgccatgataaccattgcggaaggtcagaaaacgctggcgcgcttcgcctttggcttgccagtactgcaacgccattttcatcgccacttccaccgctacggaaccggagtccgcgagaaaaacgcactccagcggttgcggcgtcatcgccaccagtttgcggcacagctcaatggctggcgcatgggtgataccgccaaacatcacatgcgacatggcatcaatttgcgacttcatcgccgcattaagctgcgggtgattgtagccgtggatcgccgcccaccaggacgacataccgtcaaccaggcgtctgccgtcagacaaaatcagctcgcaaccttcggcgctcaccaccggataaaccggcagaggggaggtcatggatgtgtatgggtgccagatatggcgttggtcaaaggcaagatcgtccgttgtcataatcgacttgtaaaccaaattgaaaagatttaggtttacaagtctacaccgaattaacaacaaaaaacacgttttggagaagccccatggctcaccgcccacgctggacattgtcgcaagtcacagaattatttgaaaaaccgttgctggatctgctgtttgaagcgcagcaggtgcatcgccagcatttcgatcctcgtcaggtgcaggtcagcacgttgctgtcgattaagaccggagcttgtccggaagattgcaaatactgcccgcaaagctcgcgctacaaaaccgggctggaagccgagcggttgatggaagttgaacaggtgctggagtcggcgcgcaaagcgaaagcggcaggatcgacgcgcttctgtatgggcgcggcgtggaagaatccccacgaacgcgatatgccgtacctggaacaaatagtgcagggggtaaaagcgatggggctggaggcgtgtatgacgctgggcacgttgagtgaatctcaggcgcagcgcctcgcgaacgccgggctggattactacaaccacaacctggacacctcgccggagttttacggcaatatcatcaccacacgcacttatcaggaacgcctcgatacgctggaaaaagtgcgcgatgccgggatcaaagtctgttctggcggcattgtgggcttaggcgaaacggtaaaagatcgcgccggattattgctgcaactggcaaacctgccgacgccgccggaaagcgtgccaatcaacatgctggtgaaggtgaaaggcacgccgcttgccgataacgatgatgtcgatgcctttgattttattcgcaccattgcggtcgcgcggatcatgatgccaacctcttacgtgcgcctttctgccggacgcgagcagatgaacgaacagactcaggcgatgtgctttatggcaggcgcaaactcgattttctacggttgcaaactgctgaccacgccgaatccggaagaagataaagacctgcaactgttccgcaaactggggctaaatccgcagcaaactgccgtgctggcaggggataacgaacaacagcaacgtcttgaacaggcgctgatgaccccggacaccgacgaatattacaacgcggcagcattatgagctggcaggagaaaatcaacgcggcgctcgatgcgcggcgtgctgccgatgccctgcgtcgccgttatccggtggcgcaaggagccggacgctggctggtggcggatgatcgccagtatctgaacttttccagtaacgattatttaggtttaagccatcatccgcaaattatccgtgcctggcagcagggggcggagcaatttggcatcggtagcggcggctccggtcacgtcagcggttatagcgtggtgcatcaggcactggaagaagagctggccgagtggcttggctattcgcgggcactgctgtttatctctggtttcgccgctaatcaggcagttattgccgcgatgatggcgaaagaggaccgtattgctgccgaccggcttagccatgcctcattgctggaagctgccagtttaagcccgtcgcagcttcgccgttttgctcataacgatgtcactcatttggcgcgattgcttgcttccccctgtccggggcagcaaatggtggtgacagaaggcgtgttcagcatggacggcgatagtgcgccactggcggaaatccagcaggtaacgcaacagcacaatggctggttgatggtcgatgatgcccacggcacgggcgttatcggggagcaggggcgcggcagctgctggctgcaaaaggtaaaaccagaattgctggtagtgacttttggcaaagggtttggcgtcagcggggcagcggtgctttgctccagtacggtggcggattatctgctgcaattcgcccgccaccttatctacagcaccagtatgccgcccgctcaggcgcaggcattacgtgcgtcgctggcggtcattcgcagtgatgagggtgatgcacggcgcgaaaaactggcggcactcattacgcgttttcgtgccggagtacaggatttgccgtttacgcttgctgattcatgcagcgccatccagccattgattgtcggtgataacagccgtgcgttacaactggcagaaaaactgcgccagcaaggctgctgggtcacggcgattcgcccgccaaccgtacccgctggtactgcgcgactgcgcttaacgctaaccgcagcgcatgaaatgcaggatatcgaccgtctgctggaggtgctgcatggcaacggttaataaacaagccattgcagcggcatttggtcgggcagccgcacactatgagcaacatgcagatctacagcgccagagtgctgacgccttactggcaatgcttccacagcgtaaatacacccacgtactggacgcgggttgtggacctggctggatgagccgccactggcgggaacgtcacgcgcaggtgacggccttagatctctcgccgccaatgcttgttcaggcacgccagaaggatgccgcagaccattatctggcgggagatatcgaatccctgccgttagcgactgcgacgttcgatcttgcatggagcaatctcgcagtgcagtggtgcggtaatttatccacggcactccgcgagctgtatcgggtggtgcgccccaaaggcgtggtcgcgtttaccacgctggtgcagggatcgttacccgaactgcatcaggcgtggcaggcggtggacgagcgtccgcatgctaatcgctttttaccgccagatgaaatcgaacagtcgctgaacggcgtgcattatcaacatcatattcagcccatcacgctgtggtttgatgatgcgctcagtgccatgcgttcgctgaaaggcatcggtgccacgcatcttcatgaagggcgcgacccgcgaatattaacgcgttcgcagttgcagcgattgcaactggcctggccgcaacagcaggggcgatatcctctgacgtatcatctttttttgggagtgattgctcgtgagtaaacgttattttgtcaccggaacggataccgaagtggggaaaactgtcgccagttgtgcacttttacaagccgcaaaggcagcaggctaccggacggcaggttataaaccggtcgcctctggcagcgaaaagaccccggaaggtttacgcaatagcgacgcgctggcgttacagcgcaacagcagcctgcagctggattacgcaacagtaaatccttacaccttcgcagaacccacttcgccgcacatcatcagcgcgcaagagggcagaccgatagaatcattggtaatgagcgccggattacgcgcgcttgaacaacaggctgactgggtgttagtggaaggtgctggcggctggtttacgccgctttctgacactttcacttttgcagattgggtaacacaggaacaactgccggtgatactggtagttggtgtgaaactcggctgtattaatcacgcgatgttgactgcacaggtaatacaacacgccggactgactctggcgggttgggtggcgaacgatgttacgcctccgggaaaacgtcacgctgaatatatgaccacgctcacccgcatgattcccgcgccgctgctgggagagatcccctggcttgcagaaaatccagaaaatgcggcaaccggaaagtacataaaccttgccttgttgtagccattctgtatttggttaaattgcgagcgagatcgcgtcttcgattgactgcaatttaaccaattaaattctaaaataatcacgaaaaaaattttacttccgcctcatgcggcgaatgtgggaattgcccaggcggcgggggataggggctggagacagttatccactattcctgtggataaccatgtgtattagagttagaaaacacgaggcaagcgagagaatacgcggcttgcacgcgaattggcgttaaagacggctcaaagaaatatcttttattttttaactggttagataaatgcaatggcagtcactgaacaggcatctcttgccataaaactgtcatcactcatcttgacaaatgttaaaaaagccgttgctttggggataacccggtaaggccggagttttatctcgccacagagtaaattttgctcatgattgacagcggagtttacgctgtatcagaaatattatggtgatgaactgtttttttatccagtataatttgttggcataattaagtacgacgagtaaaattacatacctgcccgcccaactccttcaggtagcgactcatgagtaaaccgttcaaactgaattccgcttttaaaccttctggcgatcagccagaggcgattcgacgtctcgaagaggggctggaagatggcctggcgcaccagacgttacttggcgtgactggctcagggaaaaccttcaccattgccaatgtcattgctgaccttcagcgcccaaccatggtacttgcgcccaacaaaacgctggcggcccagctgtatggcgaaatgaaagagttcttcccggaaaacgcggtggaatatttcgtttcctactacgactactatcagccggaagcctatgtaccgagttccgacactttcattgagaaagatgcctcggttaacgaacatattgagcagatgcgtttgtccgccaccaaagcgatgctggagcggcgtgatgtggttgtggtggcgtctgtttccgcgatttatggtctgggcgatcctgatttatatctcaagatgatgctccatctcacggtcggtatgattatcgatcagcgcgcgattctgcgccgactggcggagctgcaatacgctcgtaatgatcaagcattccagcgtggtactttccgcgttcgtggcgaggtgatagatatcttcccggcagaatcggatgacattgcacttcgcgtggaactgtttgacgaggaagtggaacgattgtcgttatttgacccgctgaccgggcagattgtttccactattccacgttttaccatctacccgaaaacgcactacgtcacaccgcgcgagcgcatcgtacaggcgatggaggagatcaaagaagagctggccgccagacgcaaagtgctgttggaaaacaacaaactgctggaagagcagcggctgacccagcgtacccagtttgatctggagatgatgaacgagctgggctactgttcggggattgaaaactactcgcgcttcctctccggtcgtggaccgggtgagccaccgccgacgctgtttgattacctgcctgccgatgggctgctggtcgtcgatgaatctcacgtcaccattccacaaattggcggcatgtatcgcggtgaccgggcgcgtaaagagacactggtggagtacggcttccgcctgccatcagcgctggataaccgtccgcttaagtttgaagagttcgaagcattagcgccgcaaaccatctatgtttcggcgacgccgggtaattacgagctggaaaaatccggcggcgatgtggtggatcaggtggtgcgtccaaccggattgcttgacccgattatcgaagtgcggccggtggcgacacaggttgatgatcttctttcggagattcgtcagcgagcggcaattaacgaacgcgtactggtcaccacactgaccaagcggatggcggaagatcttaccgaatatctcgaagaacatggcgagcgcgtgcgttatcttcactcagatatcgacaccgtcgaacgtatggagattatccgcgacttgcgtctgggtgagttcgacgtgctggtagggatcaacttactgcgcgaaggtctggatatgccggaagtgtcgctggtggcgatcctcgacgctgacaaagaaggcttcctgcgttccgaacgttcgttgatccagaccattggtcgtgcggcacgtaacgttaacggtaaagcgattctctacggcgataagatcaccccatcaatggcgaaagcgattggcgaaaccgaacgtcgccgtgagaaacagcagaagtacaacgaggaacacggaattacgccgcaaggcttgaacaagaaagtggtcgatatcctggcgctggggcagaacattgccaaaaccaaagcgaagggcagaggaaaatcgcgcccgattgttgagccggataatgtgccgatggatatgtcgcctaaagcgttgcagcagaaaatccatgagctggaagggttgatgatgcaacacgcgcagaatctggagttcgaagaagcggcgcaaattcgtgaccagttgcatcagctgcgtgagctgtttatcgcggcatcgtaacaggatagcgaagaagactgatgacaaacggaaaacagcctgatgcgctacgcttatcaggcctacattttctccgcaatatattgaatttgcgcggtttgtaggccggataaggcgttcacgccgcatccggcataaacaacgcgcactttgtcttcaataggaagccggaattttccttcggatttccgttaacctaaagcctgtaacgccttttccagcgcgttatgtaacaactggcggtcatgacgatacggaatatcgctggcctccagtacctcctggatcacaatccgctctttcaccgccgagacatccacttttggcccgacgatgaccgcatcaatgacctttttaccaacatactgctccataattgccagcttgctttccagcttcaaattagccgcaggtaaactcaactcacgccccagattgccgatataaaccatcggcgctggcgtgcggcgtaatgcctgggcgatttccttcagcagcagaattggcatcaggctggtataaaaactgccaggcccaataatgatgagatccgcttcattgatagcgtgaaccgcctcacgcgttgcgggtacattaggcgttaacaataactcttgaatcggcgtagttaactggtcgatattgacctcgccgtaaacttcatgcccctgatcgtcaatcgccatcagatcaacaggatgctctgacattggaatcaaatgcgtatccactttcagcagattacgaattaaattgatggcttccagaggccgcacgctaaggtgatccagcgcctttaacatcaagtttccgagattatgaccggaaagttcgccattgccaccaaaacggtattcaaacatcgcggaggcgacgctcggttccgttatcagctggttgaggcagttgcgcatatcgccccaggcaatgccgccttctgaacggcgaatacgccccgtcgagccaccattatcggtggtggtgacgatacccgttaaacgagaacccaaagacgaaagtgatgagagaacgcgtcccagtccatgccctccgccgagagcaacgacacgatcaagatcagccagcgtacgattgcgcatatagtttcctggagtcagattatccgcgctacagtagcgcaaattgcggggaaacagcaattaacctgccaatattgaggatacaaactattttcttctacctctaaaggacgatgcacgctatgcctccctgatgatgtatatcaaagtaaaaccgccattttcccttattctgtagcgaaatagcacgatcatgacgctatatacatgattacatagcgaaagtgtggatggtaaaaatctcatttacacgctagtatcggcataaccactaaacactctagcctctgcacctgggtcaactgatacggtgctttggccgtgacaatgctcgtaaagattgccaccagggcgaaggaagaaatgacttcgcctcccgtatctggaaaggtgtacatggcttcacaactgactgatgcatttgcgcgtaagttttactacttgcgcctgtcgattaccgatgtgtgtaactttcgttgcacctactgcctgccggatggctacaaaccgagcggcgtcaccaataaaggctttcttaccgtcgatgaaattcgccgggttacgcgcgccttcgccagtctgggcaccgaaaaagtgcgcctgacaggaggagagccgtctttacgccgcgactttaccgatatcatcgccgctgtgcgggaaaacgacgctatccgccagattgcggtcacaaccaatggttaccgtctggaacgcgatgtggcgagctggcgcgatgcgggacttactggcattaacgtcagtgtcgacagtctggacgcccgccagtttcacgctattaccgggcaggataaattcaaccaggtcatggcagggattgatgctgcatttgaggccggttttgagaaggtcaaagtcaataccgtgctgatgcgtgatgttaatcatcaccagctcgacacctttctgaactggatccagcatcgccctatccagctgcgtttcatcgaactgatggaaacgggcgagggcagcgagctcttccgtaagcatcacatctctggtcaggttctgcgtgacgagctactgcgtcgcggctggatccaccaattacgtcaacgcagcgacggtcccgcgcaagtcttttgccatccagattacgccggagagattggccttatcatgccgtatgaaaaagacttctgcgccacttgcaaccgcctgcgcgtttcctccattggtaaactccatctctgcctgtttggtgaaggcggcgttaacctgcgcgatctgctggaagacgatacccagcaacaggcgctggaagcgcgtatttcagcggcgctgcgggagaagaaacagacccatttcctgcatcaaaacaacaccggtattacgcaaaacttatcgtacattggcggctaaaacgtcaaaaggagagatcagatgagtcaggtaagcactgaatttatcccgacccgtattgctattcttacggtttctaatcgtcgcggtgaagaagacgatacctccggtcactatctgcgcgattcggcgcaagaagcgggccatcacgttgtcgataaagccattgtgaaagaaaaccgctacgctattcgcgctcaggtatctgcgtggatcgccagcgacgatgtacaagtggtattgattacgggtggtactggcctgacggaaggtgatcaggctcccgaagcattgctgccgttgttcgaccgtgaagttgaaggttttggtgaagtgttccggatgttgtcgtttgaagagattggcacttccacgttgcaatctcgtgcggtagcgggcgtcgccaacaaaacgctgattttcgccatgccgggttcgaccaaagcgtgccgtaccgcatgggaaaatatcatcgcgccgcagctggatgcccgtacgcgtccgtgtaatttccatccacatttgaagaaataagtatgtcgcaactgacccatatcaacgccgctggcgaagcgcacatggtggatgtctccgccaaagcggaaaccgtgcgtgaagcgcgggcggaagcctttgtcaccatgcgcagcgagacgctggcgatgattattgatggtcgccaccacaaaggcgacgtatttgccactgcgcgtattgccggtattcaggcggcaaaacgcacctgggatctgatcccgctctgtcatccgctgatgctcagcaaagttgaagtcaatttacaggccgagccggagcacaatcgggtgcgtatagaaaccttatgccgcctgaccgggaaaaccggtgtcgaaatggaagcattaaccgcggcctccgtggcggcgctgaccatttatgacatgtgcaaagcggtgcaaaaagatatggtgattggtccggtacgtttgctggcgaagagcggcggcaagtcgggtgactttaaggtggaagcggatgattaaagttctttttttcgcccaggtgcgcgagttggtgggaacagatgcaaccgaagtggctgcggatttcccaactgttgaagcgttacgccagcacatggctgcgcagagcgatcgctgggcgctggcgctggaagatggcaaattactggctgccgtcaaccagacgctggtgagttttgaccatccgctgactgacggcgacgaagtagctttcttcccgccggtaaccggaggttaagatggcagaaaccaaaattgttgttggtccgcagccgttcagcgtaggagaagagtacccgtggctggcggagcgtgacgaagacggtgcggtagtcacctttactggtaaggtgcgcaaccataacctgggcgacagcgtcaacgcattaaccctcgaacactatccggggatgactgaaaaagcactggcagaaattgttgatgaagcgcgtaaccgctggccgctggggcgcgtcactgtgattcaccgcatcggggaattatggccgggcgatgaaatcgtttttgtcggtgtcaccagtgcgcatcgcagcagtgcgtttgaagccgggcagtttattatggattatctcaaaacccgcgcaccgttctggaagcgcgaagccacgccggaaggcgaccgctgggttgaagctcgggagagcgatcagcaggcggcaaaacgctggtagttttttgttagccggataaggcaccgctgcgtccggcaatttcaccgctcagtacatacgtttacgctgcgtcgatgcacagcctcatcattttgcagtatccttaagatattccttatatcttcaggagatcgtcatggacagattcccacgttctgattcaatcgtacaaccccgggctggcttgcaaacttatatggctcaagtctatggctggatgaccgttggcttgttgctgaccgcatttgttgcctggtatgcggctaattccgcggccgtgatggagctgttgttcactaaccgtgtctttttaatcggtctgatcatcgcgcaattagcattggttattgtgttatcagcgatgattcaaaagctgagcgcaggtgtaacgacgatgctctttatgctttattcggcgctgacgggtcttacgctttccagtatattcattgtctataccgctgcttctatcgccagtactttcgtcgttactgccgggatgttcggcgcaatgagcctgtacggttacaccacgaagcgcgatttaagtggctttggcaatatgctgtttatggcgttaatcggcattgtgctggcatcgctggtcaacttctggttgaaaagcgaagcattgatgtgggcagttacctacatcggcgtgattgtctttgtcggattgacggcgtatgacacgcagaaactgaaaaatatgggtgagcagattgatacccgcgacacgtcgaacctgcgcaaatattccattcttggcgcgttaaccttgtatctggacttcatcaacctgttcctgatgttgttgcggatcttcggcaaccgccgttagttctttttcaccatcactatcccggccatgtgtcgggatttttttcttactaaaaacgacacttaacaagtaccaggtataaaatatgccttatggacgagcggaagcgttttctgtatccataaatgcaaaagtattttgtatgcgtggttttaaatttattgatggtgaatattaatattttttctaaggataactaaaagaatggaatcatactcgcaaaacagcaataaattagattttcagcacgaggccaggatattaaacggtatatggctcattaccgctttaggtttggtggcaaccgcaggactagcctggggagctaagtatctcgaaattacggcaaccaaatatgattcaccaccaatgtatgtcgccatagggttattattactttgtatgtatggcttaagtaaggatatcaacaagataaatgccgccatcgcgggcgtaatatatctgtttttactctctttggtggcgattgtcgttgcaagtttagttcctgtatatgccattatcatcgtgttcagcactgcgggcgcgatgtttttaatcagtatgctggccggtttattatttaatgttgatcctggttctcaccgttttatcattatgatgacgttgacagggttggccctggtaatcatcgtgaatgcggcattaatgagtgaacggcccatttgggtaataagttgcttaatgattgtgttatggtcaggcattatctcgcatggacgaaataagctccttgaattggcggggaaatgccatagtgaagagttgtggagtccggttcgttgcgcttttacaggtgcattaacactctattactattttatcggcttctttgggatacttgccgcgatagctataacgcttgtctggcaaaggcatacgcgtttttttcattagccgtaaatgcacatactaaagaacttaactaaacttcacatcgccgcttcatttttcgcccgtagcttcttcgcctggctttccagcaacaggtaacagatcagcgccagcagcagtgggataaagtaatacagcacacggtaagcgagtagggcggcgataattgtacctttggaggtatgctccccagccagtagtgcgataaacaccgcttccagcacaccgatccccgccggaatatgcacgatgacgccagcaatactactaaccagtaacacgcccagtacaaagaaatagttcacgctttgaccaagtaacagccagataatcgcccccattaccatccagttaacgctggaaatcagcatctgagcgagggcgaatttccatgaaggcagcaccagcttttgccctttgatggtcatatggcggtgcttcgcgaaagcgcaaaaccacaaataaaccgcgataatcatcagtaagccaatgccgagaatacgcagcgtagtttgatcgacataccagtgatccggcaactccaccacgcctgcggtaaagataatccctgccagtaaaatgtagcccagccagttggtggtaatactgagcgagaaaatccgcgtaatagtgctaccgggcaaccccagacgagagtacaaacgatagcgcataccaatgccgccgacccaggtactgagcgtcaggttgaaggcgtagcagataaacgacaccagcatcacctggcgcttcgccagtttgtgaccgcagtaaaagcgggcgagcaggtcatagcagccgtaaatcagatagctgacgaccaccagcccgaccgcactaagcagcgcaacgcgattgtagtcgcggatgaccttccagacctcttcccagtccacttttttggcgtagaccaccagcaacacaatcaccgcgataaaaaacagccaggtgaggatcttctttgctaagcgccagcgcgggtgtgatttactcatcagggttttacccccgtgttttcagtttctacccgatcctgcgtttccattgtcggttgtgcgggcggatcaacctgcgccagacgtggcgtgtgtgccggaagccagccaaccagcgccgggaagtggcgtaaaaagtggaacgccagcacgcttttggtcaggttccaccaggtgcgtttgggcagcatggtttcatccacctgctgacaatctgcggcaataatgccgttcagattatcgcgcagcgtctggttaaaatgacgatcgtggatgatgacatttgcttcgagattcagtgacaaactgagcggatcgagattactggaccctactgtcgcccagtgatcgtccatcaatgccactttgccgtggagcgggcggcggcggtactcaaaaacctgaacgccgcctttaaccagatagttatacagcaagcgcgcaccgactctgacaatcggcatatccggttcgccctgaatgatcagtttgatccgcaccccgcgccgtgccgctttacgcaaggcgtgtaaaaatcgatagccggggaagaagtaggcgttggcgataatcacttcccgccgcgcctgagtgagcattttcaaataatggcgttcaatatcatcgcgatgttcttcgttatcgcgccagaccagcaatacctgcgcttctcccggctggcggttctcttccgctttgtgatgacgtcgccaccagcgtcgtgccgcgctctgtccaggcaggttttccagctcaaactggagaatatcttcgacaatcggcccttcaaggcgtaccgcgtaatcctgtttagcctctggaccgtagctggacatatgctcggcggagtaattcagcccgccaataaaggctatacgcgcgtcgatcaccacaattttgcgatgcatccggcgaaacacattggtgcgcataccaaaaaggcgagggcggggatcgtagtagcggaacactacgccagctgccgtcagttcattgacaaactcatcgctgagatccggcgaaccgtagccatccagcaagacttccgctttaaccccgcgttgcgctgctgccagtagtgccgcatgcagttgtttgccgacgtcatcctcaaaccagataaacgtttcaagaatgatgcgttcttgtgcctcgccaatcgccttaaacaccgcgggataatattgctcgccgttttccagcaactggatcttattgccttcgcgccagctacatttcataaatgaatctccgcacttaaaggggcatgatcagaaaggtgtcgccatgtccgcagcggcaacgcggttggcgcgctggcgctggcatttttgacgtagatcctgtccagtcgtagtagaggaaattgcaccggaaacgtgcgcgccgggcgtccgtgggcgcgggtaaaaatctcatccagtccggcctgcacttttaacggatgattagctttttgccgccagtcattgaaatcacccgccaccaataccggttcgccgtccggtagctcattcacccattcggcgagcatcgcaagctgcgcctgacggtgcgcctcacgcaggcccagatgtacgcacatcacatgaatcgcttttccggtcatcggcggcacaatgcggcagtagagcacgccgcgcttttccgcaccatcgaccgaaacatcgcgattctcataatgttcaatgggataacgcgacagtacggcgttgccgtgatgcccttccgggtatacggcattgcgaccgtaggcaaaatcgctccacatagtgtcggcgagaaactcgtagtgcgaggtatcgggccagttttccacatgcagcggatgaacttcgtgcgcgcccatcacttcctgcaggcaaacaatatcggcgctgacggtacgcacggcgtcgcgaagttccggcaaaatgaagcgtcggttaaacgcggtaaagcctttgtgaatattgatggtgagcaccttgaacgaaaattgttgtgtttgatcgggcataattttcctgtctttgcctcttatctcattgaaatagtgtagtcggcgtcacaaaaaggtgcggtcttacggaattttccgtaaagttcggtactctgagtaagtagagataaattcttcaggagagaagccatgaagtggcaacaacgtgttcgtgtcgcaacgggtctaagttgctggcagattatgttgcatttactggtagtggcgctgctggtggtgggctggatgagtaagactctggttcacgtcggcgtgggattatgcgcactgtattgtgtcacggtagtgatgatgctggtgtttcagcgccaccccgagcaacgctggcgtgaggtggcagacgtgctggaagagctgaccacgacctggtattttggcgcagcgctgattgtgctgtggctgttgtcccgcgttctggaaaacaactttttgctggcaattgcagggctggcaatccttgccggcccggcggtagtgtctttgctggcgaaagataagaagttacatcaccttacgtctaaacatcgcgtacgccgctgaccctgtcgtggccgttatcaccagtagcggccacaaactattccacacaatatccagactcgcatccttcaaataaatctgcttggtaatgtccgtaaagtggcgaatagggttaatccacgtcaggttttgcagccataccggcatgttttccaccggagaaacgtaaccggaaaggagaatggcgggcatcataaagacaaacacgccgataaacgcctgctgttgtgttgaacagagtgatgaaatcaacagaccgaatcccaccagcgataaaccataaatcaccatcgtaaagtagaacagcgccagcgatccggcgaaggggatttgatacgcccagataccaatcgccagcacaatggtggcctggaaggtggcgacaattaacgccggtacggctttgccgatgaagatctgccaggtggtgagcggcgaaaccagtagctgatcgagcgtaccttgttcacgttcgcgggcgacggaaagtgaagtgacgatcattacgccgatagtggtgatcatggcgatcagtgacggcaccacaaaccatttgtagtcgagattcgggttataccagttgcgtaccaccagctcgctgttgttaggtttcggttttccttccagcagctcctgctgataatttttgacgatctgttgcaggtagttggcggcaatttgcgcactgttggagttacgcccgtcgaggatcaactgcaaaggcgcggtctggaaggtatccagtttgcgcgagaagtcagccgggaaacgcaccagtagtaacgccttttgtgtgtcgatggttgggcggatctcctgtgggcttttcagcagcagcacatgagtaaaggcgctggcgcgggcaaaacgttgggtcagctccaccgaatgctcgccgttatcttcatcgtagatggcgatggtggcgttagtcacttccagcgtggcggcgaacgggaacaggatcacctgaattagcacgggtaaaatcagaatcgcgcgggtttgcggttcgcgcagcaacgactgcaactctttgcggattaacgtccataagcgatgaaacatgctcttctccctaatccagccgacgtttggttttcagccacgtcaggccgataaacatcaccgccgaagcgatcaaaaacagcacgtttaccaccagcaccactggaatattcccggcgaggaacaggctttgcagggtgctgacgaaataacgagcgggaataatgtacgtcaccgcgcggatcaccgcgggcatactgtcgatctgaaaaataaagccggaaagcataatcgacggcagaaaagcggcgttcagggcgacctgagcggcattgaactggttgcgggtaatcgtggaaatcagcagccccatccccagggtactgagtaaaaacaggctggagataaaaaacagaatcagcagcgacccgcgatacggcacgccgagaataaacactgacaccagcatacacagcaacatcgccagcatcccgagaaagtaataagggatcagcttacacagcagcagttccgtgcgggtaatctccgtagagagcagagcctccatggtgccgcgttcccattctcgcgccaccaccagcgaggtgagaatcgcgccgatgaccgtcatgataatggtcaccgcaccggggataatgaagtgctggctaatcgccgccgggttaaaccagtagcgggtttgtacatcaataagcggttcaaaagtctgcccgttgtcctccgctcgctgcatttgccagatctgccagatcccttcgacatacccctgtacaaagttagcggtattcggctcactgccgtcggtgatcacctgaatcggtgcggtggcgttggcgcgctccatctgttccgcaaaatccaccggaataaccaccagaccgcgaattttccccgcctgcattttggcgatcagttcctgacggttatcgctgatggtggcgtcgatgtagggcgaaccggtcatggtgtgggtgaaatccagcgccgcttcgctacgctgttccagtaaaatcccgacccgcagcttgctggagtcgaggttaatgccgtaaccaaaaataaacagcagtagcagcgggatcactaccgcaatcagccagctactcggatcgcgaacgatctgccgcgtctctttaacgcacagcgcccgtacgcgacgccaggacaggatcgggttactcattgctatgctccttatcccagtcgtggatcaactgaataaaggcttgctccatggtgggatcgggttgctcatcgttagccgactgtgctttcaaatcgtccggcgtgccgctggcgattaatttcccgcggtacaccaggccgatgcggtcgcaatattccgcttcatccataaagtgggtggtgaccatcaccgtgacgcctttctctaccatgctgttgatgtgcagccaaaattcacggcgggtgagggggtcaacgccggaagtcggttcgtcgagaaacagaatgtccggttcatgcatcagcgaacaggccagcgccagccgctgtttaaaacctaatggcagttcatcggtggcgtgggaggcgatacttttcaggccgaacgcctcgctcatgcgggagattttttcgttctgcgcccgaccgcgtaagccatacacaccagagaaaaagcgtaaattctgttcgaccgtcaggttaccgtagagcgaaaatttttgcgccatatagccgagatgctggcgcgctttaccggaactctctttcagatccatccccagcaccagcgcctggccggaagtcggcaccagcaaaccgcacatcatcttaaaggtggtcgatttacccgcgccgtttggccccagcaaaccaaaaatctccccacgtttaacggcaaagttgacgtgatcggtggcggcaaaatccccaaatttcttggtcagttctttcgcttcgatcaccgtctcgccgggtgtgccttctaccgtatgtaatattgcgcccagcggcgattccgaggttccggcaccgcccagcaaatcaataaacgcatcttcaaaacgcggcgtagtttcgttgatgttgatttccggcatcccgtcggcatggcgaatatcgtctggtgtggcctcttttttgaggatcagacgtaccgatttcccctgaatcatgccgtcgctgacctgcggcagtttcaaggcgcgttgcaacagtttgcggttgccctcgtgtggactggtcatcagaaagctgcgtccggccatggtttgtgtcagggcttttggttctccctgatacagcaactcgccttcgttcatcagtaacacgtcacggcactgctcggcttcgtcgagatacgaggtactccagaggattaacatcccttcgcccgccagctcatgcaccatctgccacagttcgcgccgtgagatagggtcaacgccgacgccgggttcatcgagcagcaacactttcggttcgcccaccagggtacaggccaggccgagtttttgtttcatcccaccggagagcttgcccgccaggcgtccggtaaacggcccaagagacgtaaactccagcaggcgagcaaaagtttgcttacgtgcctcgccggtgacgctgcgcaaatccgcgtacagattgaggttctccatcaccgtgagatcttcatacagaccaaatttctgcggcatataaccgagcacggcgtgcagcgcgccgtcgtttttgatcggatcaaagccaatcaccgtggcactgccgctgtcgggtttcagtaatcccgccaacatccgcatcagcgtggttttacctgcaccgtccggccccaccaaccccgtcacataaccggcgtgaatggtacaatcgagcggcgcgacggcgggcttgtccatgcccggaaagcgtttttccaggccgttcagcgtgataacggcatcattcatgtcctgcctcgtcaccgaattgtaccgtcactggcattccctggcgtaacgcatcatcggcgtcggtcaccacaatacgcaggcgatagacgaggtcggtacgcagatccggcgtttcgacggttttcggggtaaattcagcagtcggcgaaacgaaaccaatctgcccgtgatacggcttgtccgggcgaccatcggtataaagcagcactttgcgccccggctgggcctggtcaagattacgttcatcaacataagcgcgcacccacaccggacgcgttagtgaaacggtaaacaccgtgccaccttcattgaggaccgtgcctggctccaccgcgcgcgttaacagcgtgccatcagacggggctatcaacgttgagtcctgtaaattcaactccgcctgcgccagttgcgcctgcgcctgttcgaggctggctttcgcctgagcgatgtcctgttcacggttaccggaacggtactgacgcaatttatcctgtgctgatttcagcgttgcctgcgcctggtcgcgcgaggagcgggcattttccaggtcatttgccgaaatagtgcggcttttccacaacccttgctggcggttatagaagttctgcgcatagtcataggcggcttgcgcctgtttcaccgctgcggcggcctgagcgatttcttcatcgcgatacccggcaagcatcaggtcatactgcgcctgtgccaccgaaacacccgctttcgcctgcatcagggcaatctcatacggcttgtgatccagttcgcccagcacctggcccgctttgatagcatcaccttcgtccaccgccagcgattcaacgcgccccccaacacggaaactaagatttaccgtacgaatatccacgttgccatacagcgtcaggccgttatcctggcggctttgataccaccagtagcctccggcaaccacggcggcaagtaccactaccgccaatccgatcacgacaggttttttcatcactacaaactcctttgcgataatccttgcaaaatcaggtcgatatgacaggtcaccgtctggttgatcagttcggtcttttcttcatcgaacgcggtccagccggtacgtaacagaattgtttctttgccaagacggaacgccagaatctcaccaatcaacgcatgggtatgaaggatcatgcgggtgtcattggcgtcgcagccggtccaggcggcaatcaggcgtgtcaggtggctgtgtagcggactaatcacctgttcgtgcaccaggtggtaggctgccgtgggagagagctgctcacgggagataaacttgctgaggttgacggtgtcatcctgggtgagcagcttaatcatgttcctgcaggcgcgaaggatcagttcacggatggcagcccgatcaggctgtggttgcgcgaacaagcgttcggcttcctcggcatgcggacggaactgctcgccaataaaatcggcaatccactgggcgcaggcgaggtacaaatcttctttcgaaccgaagtagtaggtgatggcagcgatattctgcccggcctgggcggctatctcgcgagtggtggcgttcattccatattcaccaaactgcgccagtgcggcagcaatcagctgttttttcgcctgttcacccttgattgtcatggcaggattattcatcgcacagtccattcttaatcaaatgattgattaagattatgactccataggggagttgtccagtatggctaagaattttagcaacgccagtcacagggataatttatgcgctgcgtcacaaaaactgctacactccgctccctcatgacattgtggtttttgtcattttccttttcagtatctccctgaaaactacaccggtaacggtcggggcggttcggagtagttatgtctttcgattctttgggtttaagccctgatatcctgcgcgccgttgccgagcagggttaccgtgaacccacccctattcagcagcaggcgatccctgcggtgctggaaggccgcgacctgatggctagcgcccagaccggcaccggcaaaacagcgggctttacgctgccgctgttgcaacacctgatcactcgccagccgcacgccaaagggcgtcgtccggtacgtgcgctcattcttaccccgacccgtgaactggcggcgcagattggcgaaaacgtccgtgattacagcaaatacctgaacattcgttcgctggtggtgtttggtggtgtgagtattaacccgcagatgatgaaactgcgtggcggcgttgatgtgctggtggcaaccccgggacgtttgctggacctggaacatcagaatgcagtgaagctggatcaggttgaaatcctcgtcctcgatgaagctgaccgcatgctcgacatgggctttatccacgatatccgtcgcgtgttaacaaaactacctgcgaagcgccagaacctgttattctccgcgaccttctctgacgatattaaagccctggcggaaaaactgttgcacaacccgctggaaatcgaagtggcacgccgcaataccgcgtctgatcaggtgacccagcacgttcactttgtcgataagaaacgcaaacgcgaattgctgtcgcacatgattgggaaagggaactggcagcaggtgctggtgtttacccgtaccaaacacggcgctaaccatctggctgaacagctcaataaagatggcatccgtagtgcggcgatccacggcaataaatcgcaaggtgcgcgtactcgtgcgctggctgattttaaatcgggcgatattcgtgtactggtggcaactgacatcgctgcgcgcggcctggatattgaagagctgccgcacgtcgtcaactatgaactgccaaacgtacctgaagattatgtccaccgtatcgggcgtaccggtcgtgcggctgctaccggtgaagcgttgtcgctggtgtgtgttgatgaacacaaactgctgcgtgatatcgaaaaactgctgaaaaaagagatcccgcgcattgcgattccgggctatgagccggacccgtcaatcaaagccgaaccgatccagaacggtcgccagcaacgtggcggcggcggtcgtgggcaaggtggtggtcgcggtcaacagcaaccacgccgtggggaaggtggcgcaaaatctgcaagcgcgaaacctgcagaaaaaccgtctcgccgcctcggcgatgccaaaccggcaggcgaacaacaacgtcgccgccgtccgcgtaaacctgccgctgcgcagtaatcttttatgccgggctatgcccggcatcaggctgatgaacaaacgcaaaactgcctgatgcgctacgcttatcaggcctacgtgaactctgcaatatattgaatttgcatgcttttgtaggccggataaggcgtttacgccgcatccggcatttcacaacaagcacttgtcagcaatttgagaacacgggaaaaaatttatctgttttaccgcccataagccaccgagacgttacttctctatagccaattgttcgcgcaactccattaaaaggtagcccagtcgattcttgcccttaccatgaccaccgtctccccagtaagcatcgttttccgtatgctcaaccagttttgcgggcgcggttgccagcaagagcgcacgcagttctgcatgctgttcgaatttagcgcgaagtgcttttcgcatcacctgttctttgaccgactcccagtttttacgcagaggcttagaacgatcgcgccccatgcgtgcggcgaccataggggaagaaacccgacggatctcttcgcggtatttttcatcaaggaatttttgtgcctgaaaatagtgttctgaggtgggccaggttttcccgtcaaccttgatgggccaggcggcaaagttagaaaaatcaccgtagtcatcgctggtgctgtagaaatttatgatggtgtcttgcatgacgtgttggatcctttgtgctcgaacgggcattaaaccgcattatgttggtggttattgcgagccgctttccagaaacagaaaaaccattacccctgaaaaccgaaaaatgccacaatattggctgtttatacagtatttcaggttttctcatggcattaaccgccgcgcttaaagcgcaaattgccgcctggtataaggcgcttcaggaacagatccccgactttattccccgtgcgccgcagcggcagatgattgcggacgtcgccaaaacgctggccggagaagaagggcgacatctggcgattgaagcccccaccggcgttgggaaaacgctctcttatttgattcccggcatcgccattgcccgcgaagagcaaaaaacgctggtggtgagtaccgccaacgtggcattgcaggatcagatttacagcaaagatttaccgctgctgaaaaagatcattcccgatcttaaattcactgccgcttttgggcgtgggcgctacgtttgtccgcgtaatctgacggcgctcgccagtactgaacccacgcaacaggatctgctggcgtttcttgacgacgaactgacgccgaacaatcaggaagagcaaaaacgttgtgcgaagctgaagggcgatctcgatacttataaatgggatggtctgcgcgatcatactgatatcgctatagatgacgatctctggcgtcgtttaagtaccgacaaagccagctgcctcaaccgcaattgttactactatcgtgaatgcccgttttttgtcgctcgtcgggagattcaggaagcggaagtggtggtggcaaaccatgcgctggtgatggcggcgatggaaagcgaagcggtattgcctgacccgaaaaatttactgctggtgctggacgaaggccatcacctgccggatgtggcgcgggatgcgcttgagatgagcgccgaaatcaccgcgccgtggtatcggctacagctggacttgttcacgaaactggtcgctacctgcatggagcagtttcgcccgaagaccatcccaccgctggcgatccctgaacgtttgaatgcgcattgtgaagagttgtatgagcttatcgcctcgttaaacaacattctcaatctctacatgcctgccgggcaggaggcagagcaccgttttgcgatgggcgaactgccagatgaagtgctggagatctgccagcggctggcaaaactcaccgagatgctgcgtggcctggcggagttatttcttaacgatttaagtgagaaaaccggcagccatgacattgtacgtctgcatcggttgattttgcagatgaaccgcgcgttggggatgttcgaggcgcaaagcaaactctggcggctggcttcgctggcgcaatcttccggtgcaccggtgaccaaatgggcgacgcgggaagagcgcgaagggcagctacacctctggtttcactgcgtgggaatacgtgtcagcgatcagctggaaaggctgctgtggcgcagtattccgcacattattgtcacctccgcaaccttgcgttcgctgaacagtttttcgcgtttgcaggagatgagtggtctgaaagagaaagcgggcgaccgttttgtggcgctggattccccctttaaccactgcgaacagggcaaaattgttattccccggatgcgcgttgagccttccatcgacaacgaagagcagcatattgccgaaatggcggcctttttccgtaagcaggtggagagcaaaaaacatctcggtatgttggtactgtttgccagcggacgggcgatgcagcgctttctcgactatgtgacggatttacgtctgatgttgctggttcagggcgatcagccgcgttaccgtttagttgaactgcaccgcaaacgcgtcgccaacggtgagcgcagcgtgctggtgggcttacagtcatttgccgaagggcttgatttgaaaggtgatctgctcagccaggtgcatatccacaaaatcgcttttccgcccatcgacagcccggtggtgatcaccgaaggggaatggctgaaaagcctcaaccgctatccgtttgaggtgcaaagcctgccgagcgcctcgtttaacctgattcagcaggttgggcgactgattcgaagccacggttgctggggcgaagtggttatctacgacaaacgcttgctgaccaaaaattatggcaagcgactactggatgcattaccggtatttccgatagagcaaccggaagtccctgaaggtatagttaaaaagaaagaaaaaacgaaatccccacgccgtcggcggcgttaatgatgtgagtcaggtaaggagtcgtaaatggactatcgcaaaatcattaaagagatcgggcgcgggaaaaaccacgcgcgcgatttagaccgggatactgcgcgcggtctgtatgctcatatgctcaatggtgaagtccctgaccttgagttgggcggcgtattgattgcgctgcgtatcaaaggagaaggggaagcagagatgctcggcttttacgaagccatgcaaaatcacaccatcaagctgacgccgccagcaggcaagccgatgccgattgtcatccccagttacaacggcgcgcgtaaacaggccaacctgacgccgttgttggcgattctcctgcacaaactcggttttcctgtggtggttcacggggttagcgaagatccaacccgcgtgctgactgaaaccatttttgaattgatgggtattacgccaacgttgcacggcgggcaggcgcaggcgaagctcgacgaacatcaaccggtgtttatgccagtcggcgcgttttgcccgccgctggaaaaacaactggcgatgcgctggcggatgggcgtgcgtaacagtgcacataccctggcgaaactggcgacgccatttgccgaaggtgaggcgctgcgtctttccagcgtttcgcatccggaatacattggacgcgtcgcgaagttctttagcgatatcggcgggcgggcgctactaatgcatggtactgaaggtgaagtgtatgctaatccgcagcgctgcccgcagatcaatctcattgaccgtgaagggatgcgggtgctgtatgaaaaacaggacactgctggtagcgagttactgccacaagcaaaagatccggaaaccacggcgcagtggattgagcgttgccttgctggcagcgaaccgattcccgaatcgctgaaaatccagatggcttgctgcctggtggctacgggtgaagcggcaactatcagcgacggcctggcgcgcgttaatcaggcattttaattcttttctcagccggatgagccatgtcatccggcttttaccccaccgcaatatgaaattcctgcatctttattgaccttcccacgcccggcgtgcagcataaaaatacaacaaacacataacataaacaggagttaaccatggaaagtggtcatcgctttgatgctcagacgctgcacagttttattcaggctgtatttcgtcagatgggtagcgaggaacaagaagcgaaattagttgccgatcatttaatcgcggcaaacctggcagggcatgattcacatggtattggcatgatcccaagctatgtacgctcctggagtcaggggcacctgcaaattaaccatcatgccaaaaccgttaaagaggcgggggcggcggtcacgctcgatggcgatcgcgcatttggtcaggtcgcggcacatgaagcgatggcgctggggattgagaaagcgcatcagcacggtattgccgccgtggcgctacataactcgcatcatatcggccgtatcggttactgggcggagcagtgtgcagcggcggggtttgtctctatccactttgttagcgtggtcggtattccaatggtcgcgccgttccacggtcgcgacagccgctttggcaccaatccgttctgtgtggttttccctcgtaaagataatttcccgctgttgcttgattacgccaccagcgccattgcatttggcaaaacccgcgtcgcctggcataaaggcgtccccgtgccgccaggttgcctgattgacgttaacggcgtgccgacgaccaatccggcggtaatgcaggagtcgccgttgggttcgctgttgacctttgccgaacataaaggctacgcccttgcagcgatgtgtgaaattcttggcggggcgctttccggcggtaaaacgacgcatcaggaaacgttacaaaccagtcccgatgccattcttaactgcatgaccactatcatcatcaacccggaactcttcggcgcgccggattgtaacgcgcagaccgaagcctttgccgagtgggtgaaagcctcgccgcatgatgatgataagccgattttgctaccgggcgagtgggaagtgaacacgcgtcgcgaacggcagaagcaggggattccactggatgcgggaagctggcaggccatttgtgatgcagcgcggcagattggtatgccggaagagacgttgcaggctttctgtcagcagttagccagctaaaaaaaagcccgtccagtggcggacgggcaaacaagggtaacataggatcaatgagggttagagcatatgcgtctgtcggcaaacagacagggaaatacttgtgctggacgtagcgtaaacgcctgatccgtccaacggttcggattttgtaggcctgataagacgcggtagcgtcgcatcaggcatctgttgccggatgcggcgtaaacgccttatccgtcctacgaattacttataaattaccgcagtaccgcttaatttattgttgttggtggcggaagtgatgctgtatccactggcaccggctgccgcggctttctcagccagtttcgcttccagggcatcgagggtggatgcgccatcggcagaaaccacgccgattttattcatgttctgtgcctgggatgccgttaccggttccgccgcgaacacgccaaatgacagagttgaaagagccatagcagcaacaacagtattgatagttttcataattaatctctcgcaggtgatttttgtataagtgacgttgtttcgtcgatgtgatgagtatcacgtttttttacgagagataaaatcgaagagaattgaccgccttgttcaaataaattgattgatatctaacctactgataaaccatttatttgttgtacttatgaacttgttttataccgcgtggcagtcacagcagcgttaaaggcacggaatgacacgcaaaatacaaattatactcgctatgcatctcgccagttgtagttaacgtaactggctgtctttcgaacctctgcgattatatcctgtataagctggtttttgtaaatctttctcctgctgacaatgaatacataagcgcacgccaggaatggcttcccgacgggcctgcgggatgggggcaccgcactcttcacattcatccaggctttcgccgcgcggaatttcaccccgagcgcgggcaatcgcatcttcaattgtactgttgatctgttcgttgacggcgtcatcgttagcccaaccggatgccatatcgacctccccatatcaatacttgtacagttaagtgtagctaatccagggacgaactcgggcagttcaagcatcagatctccgaccattcccgcagcagattatgataaagattaagcagcgacaggatctcttcactttcgccgtagcggcttttcagcgactgaatattgttgtccagttcaaacagcatggcgcgctttttatcatcgcggatcatcgactggatccacataaatgatgccactcgtacgccgcgggttacgggtgtcacgcaatgcaggctgctggagggatacaacacgagatcgcctgccgggagttttacccgatgttgtccgaaggtgtcattaacgaccagttcgccgccgtcgtagctttgtggatcgcttaaaaacagcgtggcagaaaggtcagtacgcatccagccgttttgtggatggctgcgtactgcgccatccacatggaaaccataggtttcattgttctgatagcgattaaacagcggcgtggaaagggtacgcggcaaggccgcggcaaagaataaagcatgttggttaaccgcgttcagcacctcattttgcagggcggcgtataacgtgctgcgggtgtcgacctgttgattgttcttaacttgcgcaccttgtgcgccggtggtgacgcgtccatccacccattcggcttgttccagttgttcgcgaaaacgagcgacgtcctgtggcgataacacgccgggaatgtggtacatcatacaatttctccaaaaagtggggcctgcgccccacatctgaatcagaaatgcatattggctgtgagcaagaaggttcttggctcgcccgggtgataacggtagccgctcttgttgattgaggcgacgtaatcggtatcaaacaggttgtaaacgtttagctggaagtcgagattgcgattaactcgataccccagtttggcatcggcgacccagtaaccttcggtaaacgctggcgttcccaccgcgccgtctgaacctttatgcatactgccgatatagcgtgcgcccgcgccaacagagatatcgtcggttgcctgatattggctccataaggtgaaggcgtgctccggggtatacggcagcgatgaggaaccatcctgggcaacatctttgccgtttttgatggttgctttttgctgggtatagccgccaatcacctgccacgcgggagtgatattcccggccacggatatctcatagccttcgacgcgtttcttaccgtattgcgagtaagttccgtcatcattttgctcaacttcattttcgatatcagtgcggaacagcgcggcggtgagcaacagacgtttatccagaacctgccatttggtgccaatctcgctggtgttggctttttgcggtttaaaatcggtgcggttggcactgttaccgctgccagactgcgcaagggcgaagttgttgccgcccggaggctgctgggaaacggcatagttaatatagacattgccgttttccgtcaggtgatacagcgccccggctttccagttcatcagattgcccgacttggcggtgtcgacggtggtgaccggagaaccttttgccacaccagttgggcaggtgatggcaccgcgtccgctgccgccgcaggcggtggcactgtcatattcagtatgataattatccagacggatcccgccgttcagctcaaaatcacgggtgatttgcagcgtatcaaaggcgtaaattgcgaaggtatccgtctgaccattggcgtttgcgccgttgcgcgtcaggccgccgggatgaatgctgctgtcaggatgataaatatttaccgcgggtaacgtcaccggattaacgccgtagttagtctgcgtttcacgggtaaattccacgccggtactgacatcatgaccgatagaaccggtatagaacgtcgaggtcaggttggtctggttggtgagaattttattactcacatctttggtattcgccgtgcgtgaccaggtccagctattcacatcgctggtgggctgagtaatattcgacgccccgcccataatcgccgtcatcaggtaatcctgctttacgcgcgaccaacgggtagtattgcgaatggtggtgttatcgttgatgtcgtgctcaaaacgcatggtggcggtgtcggtggtcgaatcgtcgtaatcggaatccgtgccgtaaaagttatgagtatcaacttttccggaatgattcagggccgccgttcccgcagatggggcagaatagcccggcaaaccgatggtcggaatgccgccgtctggcgtgttgtgctgggtgacatgcagataattaagatacaaacgattcgctgtaccaaggccaaaagcgacagaaggggcgacgccgtaacgctcatttttgactttgtcgcgtccggcatcgtgcgttttttcgcccattacattcaggcgcaccgcggtggtatcaccaatgacctgattgacgtccagcgtgccgcggcggaaccaggcgctgccaatactggcggaggcgtcaatgccggaatcattgcgcggctgcttgctgatcatattgatcgagcctgtcggtgcgctgcgcccgtagtcggtgccggacggccctttaatcacttcgacctgctcggtattgaaggtgtcgcgcgagacgctgccgatatcgcgaatgccatcaatataaatactgttagaggtatcggcaccacgcatataaatggcgtcgccagtggtggagttaccgttctcacccgcaaaaaacgcacccacgccggggacgtttttgagcgcgtcggtaaggttggttgcgccctgatctttaatcacttgttcagaaattaccgtcatcgtgcgggtagtatccgctaccggacgcgagaatttcggatcggcagattgttgtggcgcataaagcgaaggcgttgatgcttcgacaaccagcgtgtcatccgcgttagtttgcccttcggcggcgagtgcctgagccacaggcgtgatgccaatacaaagaccggcaaagaacgtgagcgaatgaaattgtctggcagggaaattgcgattgttttccattttgcaggtgactttttcttatatgttgaaattttcactgccacgagaaagcctctctgcggatgcgatgccactgttaatcccgtgatagtgctcgtgaaagtgataataattttgataagcattatcacttggagcgattttctatcacccattgcgcgaaaaagaaatacatttatttacattgagttcatatttgatgttttttgattacaaaacagacgaaaactgcatccagaggcgaatgcagttacgttggtggggttatttgtagatggttgcagtaccgaacatctggtcatttccgcctgcggaattaatgacataacctttcgcgccttgttcgcgcgctttttctgccagtttatcctccagatcgcttaggtttgatgcgccagttgccgaaacggtaccggcgggccgtagctgaccgctgtccaggttactcatcggttgcgcggcataagccgtgagagagattccgctcaggacggtggcaatcagtagtgtgaggcactttttcataatgacatcctcataaatacaacgggtagtgcctgataagtgtaggtcgcctgcgcgatgcaaatgacgcaaaaaattgacagagatgtgcttattttttgaacgatatatttttacaaaataagacaaatcaatgacatgcataatgctgatttttatgatgaattgccataaaccatagccatgttaaggttttggggaatgataaacgcagccagatatttaccctgtcgcgttatgcgggtatcttacgccgctgcttaaaggagaatgctatgtccgcccagaaaccggggttgcatccgcgcaaccgtcatcacagccgctacgatctcgccacgctttgtcaggtcaatcctgaactcaggcaattcctcacgcttacacccgccggggagcaaagcgtagactttgccaatccgctggcggtgaaggcgctcaataaggcgttgctggcccatttttacgccgtagcgaactgggatatccccgacggttttctctgcccaccagtaccgggccgggcggattatattcatcaccttgccgatttactggcagaagcaagcggaacaattccagcgaatgccagcattctggatatcggcgttggtgcgaactgtatttatccgctgattggcgtacatgaatatggctggcgttttaccggtagtgaaaccagcagccaggcgttaagcagtgcgcaggcgattatcagttctaatccggggcttaaccgcgccattcgtctgcgtcggcaaaaagagagtggggcgatttttaacggcatcatccataaaaacgagcaatacgacgcgaccttgtgtaacccgccattccacgattccgccgctgcggcacgggcaggtagtgagcgtaaacgccgtaacctggggctgaacaaagacgatgcactgaactttggcggccagcaacaggagttgtggtgtgaaggcggtgaagtcacctttatcaaaaagatgattgaagagagcaaaggcttcgcgaagcaggtgatgtggtttacatcactggtatctcgtggtgaaaacttaccgccgttgtatcgtgccctgacggacgtgggcgcggtgaaggtggttaaaaaagagatggcccaggggcaaaagcagagtcgctttattgcctggacctttatgaacgacgagcagcgccgccgttttgtcaatcgccagcgttaaagcgttggttcccccggcggtaacggttcagccggggtcgcgcccggagcaggcagcacctgataagtctgcactggcgcgcgaacgcccgccaggtcgaaatgttttttcacctggctgtcgagggcaaagcgtaccgtccactgtttgagtggcagcgtggtgaacgaaacacgcagtgtaaacgcggtattgcttaagccgacaatcccggcaaaattcggttcaccaataatcagcccgcgaatttcttcgttttccattaattccgctaccgcatctttcagtgcctgattggctttatcagcatcttcatggcgatcaacatcataatttgccaccaccgaaccaatgccgcggacaaagttagcaaaggtggttatcgaagaccacggaatgatgtgatacgccccggtatcctgtcgtacgcccacggagcgaatcgacatccgttccactgtgccggtcaacggcccgatagtcaccaaatctccagtgttcatgccgttttcaaactgaataaataccccggtgataatatctttcaccagcgtttgcgaaccaaacgagatagccagacctaatgccccggcacctgccagcaatggcgcgatattgacgccgatttccgacaacacaatcatgatggtgatggtactgataatcaccgccagcgcgttacgaaacagcgtaagcagggtacgcgtgcgggcgctgggtagcgggcggccatgaatatccgaagccagccggttttcgatcaaactggcgagcaccgtccagccaaccgccgagaagaaaagaatgagtgcgatacggatcaggatatctacggttttctgccccgcgccgttttgcagccagttccagaaatcgaacaatccccatgcgctcaacagcaacattaccgccacgcagactgtcagaatacgcgccgttttcagcgccgccgacagccagccattcaaccgtttttgcagctccggatagttacgctgagtatgtggcgagagagtgatggttttcgccagccagcgggaaaacataccggaaacaaacgctgcgataccaataatcgccaggctgcgcaccgttgcacccatcataaatttcaggctgttgcccggatcgaacaacgaaaagaaaaacagcacgataaaataggcgcttgccagccagtgccacaccagcgcaaaggcgcggataaacaggctgaaaaaggccagcgaatgctccgcgaagttgagcaaatgctgggtaatctcttttttattacgaaagatcaggtacaacgcccagacggtcatgcacagcataatgatgacgttcgccagcgcacctatctgtacattcacctgattagagataatcggcacggccacaatcaggccataacctatcaaactgcttaaccagctcaggcgacgactccagtaacgggcgctctcgtcctgaatcgtgaacgggcgcagctccgccacgtttgggcaaaaaatcaggcgtagtacggctttgaaaaattcaatgagggcaaaggcgttgagaaacaaactttgttggaaagcgatggtgcgactgcctgcattcaggttgtcgcttaatacctggccgacaaataatgtcagggccagtaacagcaggtcgataataaacgccccgataatcatcgccggaagctgcaaccagttgctgcgctcacgatttttttgccgcgcccactgacccattttgcgatacagcggcagtgcgcacaggcaaatcagccagtaaaaaccaaacactaataccgctaacattgaaaaatgggtcagcgcattgctgaaggtttgtggattaaacggcttatgcggggagccggtgatattgcgataaagttgcccgaagcgggcggaaagggcttcaccataatggcggctgacttcggtgaccttttgcagcacggtttgctcttcgaccagcgtcggcggcactatttttggtaccggttcagcagggggcgtagcggcaacggtgcgcaactggtcgatcaactctttacgcgaggtgtcattatccagcacatccgccagtgcgccataggccgcttttttttgttcgatatccggttccggggccggttcagtcgttgagtccgttgtcgttgtggttgtaacgccgggtatggataccgcgtgggcaggtgcgcccagcaggcagaagaggatgaacaggatccaccgcatgactcctccagtgagaaaatagagcaaaaagataagtatagatgctggaggaggggcgattttaaatgagaggaatctggtgtgcctccctttcgggtgaaagggaggaagggatattaagcaggttgctgacaacgtgcgggcttttttgtcggatgcggcgtgaacgccttatccgtcctacaagttcatgcaattttaataagttgccagatatcctgtaggcctgataagcgtagcgcatcaggcaatgtgtcttattaagagacgtgctgcaaaaattcctgcaagcgctggctcggcgggttcttgatcaacacctgcggattgccatcttccgcaatccggcctttgtcgataaagatcagccgcgaagctactttctcggcaaaaccgatttcgtgggtcacgatcaccatcgtcatcccttcttcagccagatcctgcataaccttcagcacttcatggcgcagttccgggtcaagagcggaagtcggttcatcaaacagcatcattttcggcttcaccgccagcgcgcgggcaatcgccacacgctgctgttgaccaccagaaagttcggaagggtagtgatgtgcacgttctgccagaccgactttcgccagcagctcacgtgccagtttttccgcctcttctttgttcgcgccacgcacgcgtagcgggccaaacatgacgttttccagcgccgtcagatgcgggaagaggtaaaactgctggaacaccatacctgcttcctggcgaatcaggcgctcgtcaactttcggatcgttaaccttcaggccatcgacaatcagatcgccggaggtgatttcttccagtttgttgatgcagcgcagcagggtcgatttaccggaaccggacggcccgataatcaccacgacttcgccctgggcaatgttcaaatcgatattgtgcagcacctgggttgggccaaagtgcttggagacgtttttaaattcaatcacaggattttcatccttctttccagacgacgcagaataaagctcagcaccagggtaataatcagatagaacaccgccacggcgctccagatctcaagggcgcggaagttaccggcaataatttcttgcccctgacgggtcagttccgccacgccgatcacaataaacagcgaggtgtctttaatgctgatgatccactggttacccagcggcggcagcatacgacgcagtgccagcggtaaaatgacgtagcgaatggtttcccaacgtgaaagaccgagcgccagtcctgcttcacgaaaacctttgtggatagacagcaccgcaccacgcgtgatttccgcaatatacgcgccggagttgatcatgatggtgaccaccgccgcagtaaatgggtcgatgcgtaagtcgttaaacgccatcggcagggcgaaataaataaacatcacctggacgacgataggtgtgccgcggatcacttcaataaagaccagcgcgacgtggttggctatccaacctccgaaggtgcgtgcaaaacctgccagcaatccgattaccagaccgcctgccagaccgaggaccgaaatccacagggtcattttggcaccttcaatcagaagcggaatggcaggccagatggcactccagtcaaactgcatatgttgttcctgttaccgtggtgtaaataatcaaattcagggtaattaatggccccggagcgggtttgcgcccctcaccctaatcctctccccataggggagagggaactgccagtgcgttttacaggtgtagcgttattatttcggttcagtaccgaaccattttttgtagatttcgttgtaagttccgttctcgcgcagggttttcaacgcgccgttgactttgtcacgcagctcgtcgctacctttcgggaacgcaataccgtattgctgcgcttccagagagtcacctaccgctttgaactgaccgttaccggcggttttgatgaagtacagaatgtttggcgtatcgtgcagaacggcgtctgcgcggttggtgcccagttccatataggcgttatcgatgttcgggaactgacgcagatctttagttttgatgtttgctttcgcgtaatcaacggagccagtaccgctcttcacagcaaccactttcccgtcgagatctttcacgcttttcacatcgttattgttagctttcaccatcactaacaggccgcttttgtagtagccgtcagagaaatcgatcgcttttttacgctcgtcggtgatggtaatgcccgccagcgccagatcgacgtttttggtttgcagtgccggaatgatcccactgaaatccatcggcttcagttcgtaatccagcttcagctctttagcgatggcagcccacagatcaacgtcaaagcccacatatttatcgccctgtttaaattcaaacggaacgaaggcggtatccgtcgcgacaactaattttttatccgcggcatgagaagaaaccgcaaaagccagggtcagtgcagccagtgaaacttttaatacagacttcatagcatttccttttttctatccacgggacgatcccctgcgtgacattcacatatatgaaaaaatcgtgccagttttgcaactccttgatttttcgagatgcggcaaaaacgtgatgcacgatttatagggcaataccctgaagatgcaccattctggggcaccaatctggtgcgctaaaattgtgcactcaacacagtgattatttagcgtaaaacctgatgaaaaaacaatctttatgtaacgattgtgtgatgatgtggatacaaaaaatttacttaatcagctggagatagcagatggatgcactaaataagtgcgttgaggtgggctgcaaaacaaaacggcctcctgtcaggaagccgcttttatcgggtactaaagttctgcaccatcagcgatggatttattcgatgttagactcgataaaccacaggaatttatccaggtcgcgagacgcggcggtcaggatatctgcggtgtcgtcatctttcgcttcgccaatcgctttgcgtacgtcattagcgacgattgcgtaacggtcagccagttctttcaggtgatcctgaacgttgtggatgtccagcgggtaacttttcagcggggttttgctgttgataacttgagtggtccccagagctacaccgcccagctgcactgcacgttctgccatggtatccagatgatcgatcagtgcggtgcggaagccatccagcatttcatgtacggcaatgaagttagcgccgcgcatgttccagtgcgcttgtttggtaatcaaagaaagatcaataaactggataacctggcgattcagcaactctactgttgcttttttctcgctgtcggagacatcgttgcgggtataaagcagattggtcgcttttgatttaactaatttagcggtactcataatttcatatcctcttgatgttatgtcccagtaattaacgagactaagtatagcaccggctatgtgttccgctattctggctgttcctatcacactaatagtggtaacaagcgtgaaaaacaaaactaataaagattcaatgagttagatatattgataagaacaattcttatttatctgctcgccaggaattttcggaataaatatgcttttgcataattcgatatataaagacggtgtagaggaaaagtagcgagaaattctgcatggttatgcataaccatgcagaaatgtaaatttaattaatgtctaattcttttattttgctctctttgcgtactgtcagcgtagaccccattgaagcggcgatgatagcgccgagcgccagtagctgtatgggtgtcagtgtttctccgaggaaaatcatcccggaaacggcagccagcgccggttccatgctcatcagcgtaccaaatgtccgtgttggcaaacgggtgagggcaatcatttccagcgaataaggcagagcggtcgagagaatagcgacagccagacccaatggaataaccgaccagtgccagagtgcttcaccagcctgaagcgctccaattggcacgaaaattaacgctgcaatcaacgaaccaattgccaccgtcgcagggccatgttccgctcctgcgcgttgcccacttaaaatgtaaatagcccaacaagccccggcccccagtgccagcgcacagccggttaaatcgacatgggaaacgtcttgccccagcggtagcaggaaccacagaccaagaaccgccagcacaacccagacgaaatctaccgggcgacgagaagagaacagcgccaccgccagtggtccggtgaactccagcgccaccgcaatacccagcggtactgtctgaatagaaagataaaaaagataattcatcccacccagcgaaacgccgtaaaacaacagcggtaaccgttgctctttggcaaagcgcagtcgccatggcttaaagaacgcgatgaggatcagcgttcctaatgccagacgcagcgcagtgacacccggtgcgcccaccagaggaaaaagtgacttagctaacgaggctccaccctgaatagacgccatggcaacgagcaatatgactattggtaaccagaccggcattttacgtaatgaaccaggcatcctttctcccacaaatatctagacttaagtaaagcgtggagtgtactggatatacccaatgctggttgagcatttgttgaaaaaattttcccccgttttgactaaaatgcgccaggattgatggaatcattagtctggtgattaggaataatctggatgaatgacagggaaaacatgcgtaatacttacgcagttctctgaaaaagtgatttaaatttagatggatagcggtgtatggaaacgttctgttacatgaaatggcccgttagacatcacaaatcgcgaagagtttcccattaatttttgatatatttaaaacttaggacttatttgaatcacatttgaggtggttatgaaaaaaattgcatgtctttcagcactggccgcagttctggctttcaccgcaggtacttccgtagctgcgacttctactgtaactggcggttacgcacagagcgacgctcagggccaaatgaacaaaatgggcggtttcaacctgaaataccgctatgaagaagacaacagcccgctgggtgtgatcggttctttcacttacaccgagaaaagccgtactgcaagctctggtgactacaacaaaaaccagtactacggcatcactgctggtccggcttaccgcattaacgactgggcaagcatctacggtgtagtgggtgtgggttatggtaaattccagaccactgaatacccgacctacaaacacgacaccagcgactacggtttctcctacggtgcgggtctgcagttcaacccgatggaaaacgttgctctggacttctcttacgagcagagccgtattcgtagcgttgacgtaggcacctggattgccggtgttggttaccgcttctaatcactttggtgatataaaaaatccgcctctcggggcggatttttgtttttaaggtttcgggtcgaaaatatcggttccgagatggttgtaatccaccttctgtaactggaagttggtgatgtatatcggcccggctttcttctcagatataaacgggtatttgatgttaatttccttcgctttaatccccgtccactgggagaaaaagcctaagaagtcattggctgagcggcgggctttaatcacacgatgcgctttatcgtcgctggaaatgaccataaaaggcacctggaaattttgctgatatttatcatcatgggcaaggtattgcacgtctttaccgcgctctttaaaggccagaccgtggtcagaaaagtaaaccagcgagaagctgctgccgctgttgcgtaactgatcgtacagcttgcgcagtaaatcgtccgtttgcgtcatggtatagagatagcacgacgtttctttcgattgcacaaaggtttcgtattttccttgtgtcctgtcgcaggcctgcggatgtgagcccatcagatgtagaacaatcagctgcggttgcgagtgctcttgcgccagcacttgagcggtcatatccagtaacgcttcgtctttggtgtttttatctgcttcaaaattaccttctttcaggaagtacacttcatctgctcgtttggcgatgctggcgatagcggtatcgtattcgccgatttgaccctggttggaaaaccaccaggtctggaagcccgcgcgatttgccagggtgacaaagttatcctgaaactgtggtttgccatcgacaacgcgattgagcgttaagccaagcgatttctgcgtggagccactggcggcaatgtagtcagcaaatatcaaaccgttaacgctgctggcaaacggggtattgtcccagtgaccgccaaaggcaccgagggcatcgcgacgcgcgctttcaccgatcaccaccacataggtctgatacttcggcttaacggcagtgaccgtccaggtatctttcattccggaaagttttgccatccgttcttgctcttcaatcacctcgttattattgacgatgacatccttagcaaaacgaaataccggatagccagtatctttcagtttaaatacgccaccccaggccaggttttgcacgggagcaacaaaaaatgtcgccacactgaataccagacacaggctgtcgaaggtattccagcgcgctttttcattctctttttttcgcctgattgctattacgccgagcgcaaaaataaataagccgaccaggtagctgtaccacggaaaaatcgtcaggatttcggtcgactcttccatattggtggagtgcaatgccagcaatgtattgaaattaggcgcgccgtaggcctgagcaaaagggaaataacaagccgccaccagcgaactgacaccgaccagaactttttgtacgcgaggcaatgttcgccatagcaaaagcaaaatagccgtaaacgcagcggtgtagagcaaactgaaggggtaacctaagccgaggttaattaatagcgactgtaaaaagtagaacgcagtccacgggctaaatacccggctacgggtaacaagcgattctttgagggttaaattcatatgccactatcgtaacaaacgccatgtgcttaccctggcgtcaagggtcaatacctgcaagagtgcgtgaagagtggaaaggggtccgcatccgcgagccgcaatatacgcagggctgcaagaagatagagcgagccgccgttcaggtcaactactgacgaacaaatcttttgcgaaggggattgcaaatccgacaaaaagtggggtttttcagaccaaaacgcgttatgcctgcatgaaagcaggagtgaagcggcgtaccgcgacgccgctatttatcggaaggtttatcttgctgcggtttgttgttgaccatatcgcacaacatagagagcagcattaaccgtactttaaagggagaatgactaaacacgcgcatacacctcttgaactcattcataagacctcctgacttgctaatcccgtcgatccttgagggatgattgcattacatacagatatagcacaggctatattatatagctattgctaaaacgttaattttttgtaccttcgcaactctggtttacaatgtgcgcacgaaatgagaacgctatgtatgcgtcaccataatgaggaagcacaatgagtcgtcgcgcaggtacgccaacagcaaaaaaagtgacgcagttagtgaacgtggaagagcacgttgaagggttccgccaggtcagagaggcgcatcggcgcgagcttattgatgattacgttgagctgatttctgacttgatcagggaagtgggggaagctcgtcaggtggacatggctgctcgtctgggagtttcgcaaccgacggtggctaaaatgcttaagcggctggcaaccatggggctgattgaaatgatcccctggcgtggcgtgtttttaacggcagaaggagagaagctggcgcaggaaagccgcgagcgacatcagatagtcgaaaatttcttgttggtgttgggcgtcagtccggaaatcgcccgtcgcgacgcggaaggcatggagcaccatgttagtgaagagacgctcgacgcttttcgtttgtttacccagaaacacggtgccaaatgagcctgccttttttacgcacgctgcaaggcgatcgtttttttcagttattaattcttgttggtatcggattaagctttttcgtgccctttgcaccgaaatcctggcctgctgctatcgactggcacaccatcatcaccttaagcggcctgatgctgctgaccaaaggtgtggagttaagcggttattttgatgtgctggggcgcaaaatggtgcgccgctttgctacggagcgtcggctggcgatgtttatggtgctggcggcggcgctgctttctacctttctgaccaacgatgtcgcgctgtttattgttgttccgctgactatcacgctaaaaagactgtgtgagatcccggttaatcggctgattatttttgaggcgctggcagtcaacgctggttcgctactgacgccaattggcaacccgcaaaatattcttatctggggacgttctggtctttcgtttgccggatttattgcccaaatggcaccgctggctggcgcaatgatgctgacgctcctgctcctgtgctggtgttgtttccctggaaaggcgatgcaataccatacgggggtgcaaacaccggagtggaaaccgcggctggtgtggagttgtctggggctgtatatcgtctttctgacggcgctggagttcaaacaagagctgtggggactggtgattgtggcggcaggctttgcgctgctggcacgtcgcgtggtgctcagtgtggactggacgctgctgctggtgtttatggcgatgtttatcgacgtccatttactgacccagcttccagcgttgcaaggcgtgttgggtaacgtgagtcatctatctgaacccgggttatggttaacggcaatcggtttatcgcaggtgatcagtaacgtgccgagtaccatattgttgctgaactatgtgccgccgtctttattactggtatgggcggtaaacgtaggtggctttgggttattacccggatcgctggcaaatttgattgcgctacgtatggcgaacgatcgccgcatctggtggcgtttccatctctattcaataccgatgctgttgtgggcggcgttggtgggatatgttttgttagttatactcccggccaactagggtctggcaaataaaaaaggcggattatgagtccgccttttgctttaagttttgaagattaattcagacgaaccggcatcccggagcggtttttaatcgcttcatcaagaacaacctggtcaacatctggctgaccggtcactgtctgcacgctcttcgtcagggtaattggcacaatttcctgaccttcaaactgggcttcggtggtagacagcgggttatggacttcaatataacggctgccgtctggctcggtggtcgcttttaccggctcatcaataaactgtacgcgggtaccgaccggtactttctcgaacaggaatttgatgtcttcgttacgcagacgcacacaaccatgacttacacgcaggccgataccgaagttggcgttggtgccatggatagcatacaggcgaccgatatagagtgcatacagccccatcgggttatccggacctgccggaacgacagccggaagcggttcgcccgcagcgcggtactctgcgtgcattttggcggtcggcgtccaggtcgggcctgcttttttacgctcaactttggtggtccagttgataggcgtatctttgcctaactgaccaatgccgatcggcagcacgataacggtgttggtccctttcggatagtaataaagacgcatctcagcactgttaatgacgatgccttcatgaacggtatccggcaggatcagctgctgcggaatgttcagtacagtaccgcctttcggcaggaaggtatccacacccgggttcgcttccatcatattggaaagccccatctggtactcggcggcaaaatactccagcggctgagtgttaccttcaggaatggtgatcacctgattctgaccaaccaggcgactcccgtcggttggcagaggataagttaccgcagaggcggtactgcaaaagccgacaacagcgaaggccgctgcgaataatgttttcaatttcatattcatgttaagcgagattttgtgcctggcaggccattgggttgagaatattagagtattggaagcgcattataagttcattccagctcacagtgaaatcagatgtgtacgaaatcacattttttgcctttggcttgagtgtagaccttaagcgaggagcaggatcttctttcagacttatggcataatgcgcggtttgtcatatctcttttcaggatacgcctgtgttagtttccagtaacgtcaccatgcagttcggcagtaagccgttgtttgaaaacatttccgtcaaatttggcggcggcaaccgttacggcctgattggcgcgaacggtagtggtaaatccacctttatgaagatcctcggcggcgaccttgagccgacgctgggtaacgtttccctcgatcccaacgagcgcattggtaaactgcgtcaggatcagtttgcctttgaagagttcactgtgctggatacggtgatcatggggcataaagagttgtgggaagtgaagcaggagcgcgaccgcatctatgctttgccggaaatgagtgaagaagacggctataaagtggccgatctggaagttaaatacggcgaaatggacggttactctgcggaagctcgcgccggtgaactgttgcttggcgtgggaattccagtggaacagcactacggcccgatgagtgaagttgctcctggctggaagctgcgtgtgcttctggcgcaggcgctgtttgctgatccggatattctcctgctcgacgaaccgaccaacaacctcgacatcgacaccattcgctggctggaacaggtgctgaacgagcgtgacagcaccatgatcatcatctcgcacgaccgtcacttccttaacatggtctgtacccacatggcggatctggattacggcgagctgcgcgtttatccgggtaactacgatgagtacatgacggcggcgacccaggcgcgtgaacgtctgctggccgataacgccaagaagaaagcgcagattgctgagttgcaatctttcgttagccgctttagcgccaacgcctcgaaatctcgccaggcaacttcgcgcgcgcgccagattgataaaatcaaactggaagaggtgaaagcctccagccgtcagaacccgttcatccgttttgaacaggataagaaactgttccgtaacgcgctggaagtggaaggtctgaccaaagggtttgataacggtccgctgtttaaaaatctcaacctgctgctggaagtgggtgaaaaactggcggtactgggtaccaacggcgtcggtaaatcaacgctgctgaaaacgctggtgggcgatctgcaaccggacagcggcaccgtaaaatggtctgagaacgcgcgcattggttactatgctcaggaccacgaatatgagtttgaaaatgatctgaccgtgttcgaatggatgagccagtggaagcaggaaggcgatgacgagcaggcggtacgcagtattctcggtcgtttgctgttcagccaggacgacatcaaaaagccagctaaagtgctttccggtggggaaaaagggcggatgctgtttggtaagttaatgatgcagaagccgaacattctgatcatggacgaaccgaccaaccacctggatatggaatccattgagtcgctgaacatggcactggaactgtatcagggcacgctgatctttgtttcacacgaccgtgagttcgtaagctccctggcgacccgcattctggaaatcaccccggaacgcgtgatcgactttagcggtaattacgaagattacctgcgtagtaaagggatcgagtaagtgattatccgtcaccccgatactgtcggggtgacggcggctgatgacaaatgcaaaatagcctgatgcgctacgcttatcaggcctacgcagtacctgcaatatattgaatctgcaggactttgtaggccggataaggcgttaacgccgcatcaggcattaacaaagcgcatttgtcagcaatctgagtaacgtcgaatcgattttcttaatcccacatcaattcacttccattaattctcaaacatccatgcccaacgctcgcttaccgtgaatgttgaggtcggcaagcgtaaagcgtccttcccagtttgtttcatagtcctcgcgcgggaagtcgcccggcgatgcgcctttttccagtgcggccttcaccttgtgcgcgtaggcaagatttttctcgcacatcggtgccgcaggaatgtacatcacgttgccccaaccttgttgattttcaacgggggcaacggaatggatgacgtcgcagtgccaccagacggagtctccggcttcgagttttggaatgctggttaacgcctcaatcaacagtggatgccattgctctgataccggcaatactcttccgggcgctacgccgcacagttcatcctccggcacatcatcaagcagcggacgtaacagtacgtacgccatagcttcaggaatgggcacgacgtgcagcagcccctgaccaggcagcatatcagagagcgctgtccagccctggaatgtccgaaacacggaacatttggtggtgttgtccaccgtgtactcttcaacttccgtacgatgtgccgcatgccagggatcatattgcgccagattgccattaaagacgttggcgaaaacgcgctgatacgctggaagcagccagcgttccagtgccccggagtcggtatgcgctccaagacctttggaggtcgttccgggcggacggcggcggatacggtcagggtagatgacgctcacatccgggttaaaccattgctttccatcactttcaaatgtccacagacgattgagaaacgactgcgcattcgccatttcttcactctggcgggcctgcatttgcgcctgcgaccagtagatggggtaaatctcgggacgtgaagcgctgagcgtcccgaagaaattatcgccggggcctttgtagacctcgtcaaagcggttgcggtccagatagtccagcatcgactgatcccagcctagcgcttgttcgcgggggaaatggccttttatcaccgcacaaccgcgacgtttaatctgttcgcgctgctctgcagtaacatgacctgctttgatatcggcataagacagcaccggccagacggcatcgccctgtgctttgagtgcgttgatttcagccactcgcgtggcaatgtcatcgcttagctgattaaagatctgctggacgtcgccaagctgcgcccgcagcgcgtgcttcatctgacggatagctgctttgtgatcggcaggcaatgtgtcgctggtaaaagtagaagccataaccacctctcattaactttcattcgaaaccattctgatttgcatgtgacaatataagttataaataagttaatgcaagtttaatgatttgatgtgatgtacaggatgtaaaaagaagggaaaaccggagcgcacggctccggtagagaggtcagctgttaaaaggggatgtgttatccagcaccgcctgaatcacattcagcgcgccttcatgattattatcatcggtagcgtaacgggcgatttgtttaatgttttccgcagcattgcccatcgcaaaggaataacgcgccattttcagcatctccgcatcgttaccgctgtcgccaatcgctaccacattttgcggtgacagatcccagcgtttcagtaaccgcgaaataccgtttgctttatgtagaccgggaataatcaggtcgataaagccaaaaccactggtaacgggtttcataatgccatcgagcgctacgtgcagtttgtcgatcactaacgggatttgttcatccggcaggttgagcgaaaacttgaacagtacgtcgtcaatctcctgataatcttttacaggtttcaggcgatggtagtgttttgccatcagtgcgacaaatgcttcgggggcattttcgctgacatatgcactttgcagaccgcaggcgacaaaattgagttgcttatcttttagcaactcgccaataacaatccgcgattcatgtcgggtcagttcgccgtggaacaactgcttgccatgttcgtaaaccagtgcgccgttttccgcgacaaaagagatctcatcctttagctcaggaaagaatgaaataagctggtaatactgattaccgctggcaacaacgaacttaatgccgcgctttttcagttcctgatattgcgccataaaacgtggttggttgtacgttttggcgtcgttaagaaaagtaccgtccatgtctgtgacgataacttttacgctcataggtgtgctcctggctcgaaaatgaaaccgtaacagtgtaataacaatgtgacgcagagcacaaattatatttcgaatgaaagtaaggatgaaattgatgatgtgaatgatttagcccggcgacgacgccgccgggccgaggagattacagcatatgttcagtacgggcgatgatatcgtcctgagcgtctggagagagcgcggtgaagaacgcggaatagcccgcgacacgcactaccagatcgcgatactgatcgggatgttttttcgcatccagcagcgtttcgcgggaaacgatgttgtactgaatatgccagcctttatgcacttcaaagaaggtacgcagcaggatcatcagtttctgcttgtcagattcgttctccagcgttgccggattcagtttctggttgagcaacacgccgccgagaatcgctgccgtaggcagtttacccactgagccaatgaccgcagtagggccaagatggtcagtaccggaggccgggcttgcgccttctgccagcggggtgtgggctttacgcccgtccggtgttgccatagtctgcgcgccaaacggtacgttagcggagattgatgacgtacccgcgtaatagttgccgccaaccggaccacgaccgtagcgcggattatggtactgtttcagttcgtcgatataggtctgataagcgcgagccagcagcgtatcgacagtatcatcgtcgttgccgtacttcggcgcaccgttaatcagccgctgacgcagctgctcgtgagtcaggccgtcgaagtcatctgccagtgcggcagcaagctgttgctgaccaatcgcaccttgttcaaacaccagtttcttcactgccgccaggctgttgccgaggttggcaatgccgacctgcaggccagaaacccagtcatatttcgcgccgccttgcttgatacttttcgctcgctcaatacagtcatccaccagcgccgagcagagaatatcgtgcacgttctcttccagcatggtgtcgacgacatattcgatttcgattgatttgcgggtgtagtaacggatttgcgtatcccacgcgtccatcacttcatcgaagttgttgaagttacctgccgacaacgctttttcttgtggcaggaacactttgccgctggtggcatcatgcccgccttccagcgccgccagcatcacgcgggcgaagttgataaagctcatgccggtacagcgatagccccatttgccaccgacggcggtttctatacaaccaatcgctgcgtagtcataagcgtcctgcggttcaataccgagtttaataaattccgggatcacgatttcgtcgttgttgaacgccggcatcccgaagccgcaacggatcacctgtacgcaggcgtcgaggaaatcgttgctcattcctgcatggtaacgcacgctgaggttaggctgagtggaacgcaggcgaccgcaggattcgaggatcgcgtaagagagtggattcaccgcgtccattggttgaccatcaaccagattttgcccgccaatagtgacgttctgatacagcggacttcccgcagaggcttttgagtgtgagccggagcggatcttgttcacttccagcagtttcagccagcagctatgcagcatctcgatggcgtgttcgcgatccagcgtctggttgagttcaacgtcgcggcgatagtacgggtagagatactggtccatacgaccaaacgatactgagtgaccgttagattcgatctgcaaaatcaactggatgaagtaacacagttgcagcgcctgccagaaagtctgcggcggctggtgggcgataagatcgcagttttctgccatcgccagcagttcatcgcgacggctttcgcgggtttcggtcgcggccatttcacgcgccagggcagcgaaacgttcaatgtgttcactgactgccaccagcacgatatcaatcgctttcaggaattgctcaccgtgtaaatcttccagcaccgtcaggttgatgcgcgagcgacgttccgctactttctcgcgcagaccatcaagccctttttccagcagcagcgggaaattcaccgccaggtgcgcatcgccggaggtcatattgccttccgctttaatgattccggtcgccagcagacctttttgctcatcggtaaacatgccgtagcagcgatcctgtacggtctgaccgcgccaccacgggcacacttcatgcagaacgcgtttgttctcttcgctcaccgcaaagccagcaccgggacgatctgccagatcatcaatctctttttcgatccacgagacagtatattccgggaagatcggcgcggcgcgaacttcgcttgcctggttgccaatgatcaactcatcgtgtttgatccagatggtgcgattcgccaggtgatgcgccagtgccagcgcgcgacgtaccgggatcggcttatcgagatgttgttgatacatctcggtatagtgctgcgcgcgctcggtacagactggcggtttcacaatatgcaccagcgcatttttgtgcgctttaatgcggtcgctgagcgtgtccagtttcagtgtggtcatggttgttatccttgtaaggtcgcggttaaccctttctggcaggcatactgctgggcaaagtcgagcagttctggcgcatcaagcggtttttccggggcgtcatagggcagattaagtaagtgatatttgttgatgcccagcgtgtggtagggcagaaaatgaatttcgccaacgtgcagctcgtcggcggcaaaatcggtaatggcttttacagaggtttcgtcggcattaaagccctgaatcagcggcacgcggataatgatttttttgcccgctgcggcgagttttttcaggttatccagcactctggcggcgttaccgtcggtccactgtttaaacggcgcgtcggcaacgtgttttaaatcggcaagaaacagatcgatatagggcagagaaggggcgatatatttccacggcacatgcagacaggtttctaccgcagtatgaatgcctgcctcgtggctggcttgcagtagcgccatcgccatttccggctgcataaagggctcaccacccgaaagcgttaaaccgccgccgctgcgatcgtaaaacggtttatcgcgcagaacggtcgtcatgatctcctcaacgcttttcacttcaccacacacggttaatgcctgtgtcggacagcagtcggttaacgccgtcagatgctccggggttaacttttcccgatgaataagcaaaccattcagcgcgcgctcaatcacttccggcgcggccttagcgcacagctcgcagccttccagacacagtcgtgcgtcatacagcagatcctgcgtgcgggcgcggctttccgggttctgacaccagcggcagcccagcgaacagcctttaagaaatacgaccgtgcggataccggggccatcatgggtcgagtagcgctgaatattgaaaatcatagttgcctctctatttcgttcaagcattaaaatactttcgaatgaaagttagattgatgtgcgtcaactgttcagagagttttcccgtgatagtctacattcagacaaaaagtacattttgaggatggttatggaactgtatctggatacttcagacgttgttgcggtgaaggcgctgtcacgtatttttccgctggcgggtgtgaccactaacccaagcattatcgccgcgggtaaaaaaccgctggatgttgtgcttccgcaacttcatgaagcgatgggcggtcaggggcgtctgtttgcccaggtaatggctaccactgccgaagggatggttaatgacgcgcttaagctgcgttctattattgcggatatcgtggtgaaagttccggtgaccgccgaggggctggcagctattaagatgttaaaagcggaagggattccgacgctgggaaccgcggtatatggcgcagcacaagggctgctgtcggcgctggcaggtgcggaatatgttgcgccttacgttaatcgtattgatgctcagggcggtagcggcattcagactgtgaccgacttacaccagttattgaaaatgcatgcgccgcaggcgaaagtgctggcagcgagtttcaaaaccccgcgtcaggcgctggactgcttactggcaggatgtgaatcaattactctgccactggatgtggcacaacagatgattagctatccggcggttgatgccgctgtggcgaagtttgagcaggactggcagggagcgtttggcagaacgtcgatttaaccggacgttctgcatcctcataaattgctgatgacgtggcggagtgccgcgtcttatcaggcctggaggtggcaattactgcccacacacctcacaccccggattacgcatcagtttcatttcgcgaaactgacaggtcatcgcatcgtacatgacgattttcccgctggccggtttgccataacctgccagcattttgatcgcttccattgcctgcaacgaaccaattacgccgatcaacggtgccattacgcctgcttccacgcaggttaatgcattttcaccaaacaaacggctaaggcagcgatagcacggttcaccgtcctgataagtaaagacggtgatttgaccttccatacgaattgccgcgccggaaaccagcggtaccttcgcggaaaaacagcctgcgttcagttgattacgtaccgcaacgttatccgtacagtcgagcaccagatcgtgttcagcaatcaatgctgcaagttctgcgtcatccagcagtgcattgactggcgtaatcgcgatatgtgggttgatccgcgtcagggcgtcacgggcggattccaccttcggttgcccgaccgtggcatcactgtgcagtgtctggcgttgcagattcgagagcgaaaccgtgtcgaagtcgagcagcgtcaggttaccgacaccggcgcttgccagatactgcgaggctgcacagccgaggccgcccaggcccactatcagcacgcgagaatctttcagcgcctcctggccgtcaaaatcaaagccgcgcagaatgatttgccggttgtagcgcagcatctcctgatcgctgagttccgccattacaggcctccgaacaacgcgttaaacggttctacttccacccattcgcccacttccacattgccgcgatcgcgttccagcacgataaagcagttgccgaggctaaaggagctaaatatatgtgaaccctgatgtccggtggtcgtcacttccagttcgccatcggcgttgcgttgcagcacgccgcgctggaaatcaagacgtcctggcgtttttttcaggcgggacgctgtgcgtacgcgctggcgcgcgggcaggccgctggcggtgttaccgcttagttttgccagcaaaggctgtaccagttgatagaaggtcagcgtcgctgaaaccgggttgcccggcaggccgcagaaccagctattgctgagtttaccgaacgcgaacggtttacctggtttaatcgccagcttccagaaggcgatctcccccagctcttcaagaatcgttttggtgtaatccgcctcacccactgaaacaccgccggaactgatcaccacatccgcctggctgtcggcttcaataaatgcggcgcgcagggcatggggatcgtcgcggataatccctaagttaattacctcgcatcccaactgttctaacatcaggtgtacggcgagacggttggtatcgtagatttggccgtcgcccagcggctgaccgggcaactggagttcatcaccggtagaaaaaagcgctacacgcactttacgaatcaccggaacttcggcaatccccagtgaagcaattactggcagctctgcggtagtcaggcgagttcccgccgggaaaacaaccgcacctgcagagatatcttcaccgcgacggcgaatattttgcccgctacgcacttcagcagtaaaacgcacgccattgtccatttgttcagtctgctcctgcatcaccaccgcttcgcagccttccggcaccggcgcaccggtcataatacgaatgcaggtacccgcaggccattcaccatggtatggctgaccggcaaaggatttaccggcaacgggcagcggttgcccggaggcaatatcggctaaacgcaccgcgtagccgtccattgcggagttatcaaaccccggaacatcaagcggcgaaacgacatcgctcgccagaatacgaccaaaacactgtaccagtggcagcgtttcctgggcggtcagtggggtgacgcgagaaagcatctcattaagcgcggtgtcgagcgacatcaatccggtggtaaattccatgaaaacactcctgcggaggcaaaatcgaatttgcctattatgtcagaaaaacgccacagactgtatgccacctcgggcgtagcgctgggtcctgcctttacatgccatatccatctttctatattcaaaaattgaatgagtaattcataaaaattctgatatttatagcaaaagtggcgaaccacccttaatggacgaatactatgggcaaagcagtcattgcaattcatggtggcgcaggtgcaattagccgcgcgcagatgagtctgcaacaggaattacgctacatcgaggcgttgtctgccattgttgaaaccgggcagaaaatgctggaagcgggcgaaagtgcgctggatgtggtgacggaagcggtgcgtctgctggaagagtgtccactgtttaacgccggaattggcgctgtctttacgcgtgatgaaacccatgaactggacgcctgtgtgatggatggtaacaccctgaaagccggtgcggtggcgggcgttagtcatctgcgtaatccggttcttgccgcccggctggtgatggagcaaagcccgcatgtgatgatgattggcgaaggggcagaaaattttgcgtttgctcgtggcatggagcgcgtctcgccggagattttctccacgcctttgcgttatgaacaactactggcagcgcgcaaggaaggggcaaccgtcctcgaccatagcggtgcgccactggatgaaaaacagaaaatgggcaccgtgggggccgtggcgttggatttagacggcaatttggcggcagccacgtccacaggcggaatgaccaataaattacccggacgagttggcgatagtcccttagtgggtgccggatgctacgccaataacgccagtgtggcggtttcttgtaccggcacgggcgaagtcttcatccgcgcgctggcggcatatgacatcgccgcgttaatggattacggcggattaagtctcgcggaagcctgcgagcgggtagtaatggaaaaactccctgcgcttggcggtagcggtggcttaatcgctatcgaccatgaagggaatgtcgcgctaccgtttaacaccgaaggaatgtatcgcgcctggggctacgcaggcgatacgccaaccaccggtatctaccgtgaaaaaggggacaccgttgccacacagtgatgaacttgatgccggtaatgtgctggcggttgaaaatctgaatattgcctttatgcaggaccagcagaaaatagctgcggtccgcaatctctcttttagtctgcaacgcggtgagacgctggcaattgttggcgaatccggctccggtaagtcagtgactgcgttggcattgatgcgcctgttggaacaggcgggcggtttagtacagtgcgataaaatgctgttgcagcggcgcagtcgcgaagtgattgaacttagcgagcagaacgctgcacaaatgcgccatgttcgcggtgcggatatggcgatgatatttcaggagccgatgacatcgctgaacccggtatttactgtgggtgaacagattgccgaatcaattcgtctgcatcagaacgccagtcgtgaagaagcgatggtcgaggcgaagcggatgctggatcaggtacgcattcctgaggcacaaaccattctttcacgttatccgcatcaactctctggcgggatgcgccagcgagtgatgattgcgatggcgctgtcatgccgcccggcggtgctgattgccgatgagccaaccaccgcgctggatgtcactattcaggcgcagatcctgcaattaatcaaagtattgcaaaaagagatgtcgatgggcgttatctttatcactcacgatatgggcgtggtggcagagattgccgatcgggtactggtgatgtatcagggcgaggcggtggaaacgggtaccgtcgaacagatttttcatgcaccgcaacatccttacacccgtgcgctgttagctgctgttccgcaacttggtgcgatgaaagggttagattatccccgacgtttcccgttgatatcgcttgaacatccagcgaaacaggccccccccatcgagcagaaaacggtggtggatggcgaacctgttttacgagtgcgtaatcttgtcacccgtttccctttgcgcagcggtttgttgaatcgcgtaacgcgggaagtgcatgccgttgagaaagtcagttttgatctctggcctggcgaaacgctatcgctggtgggcgagtctggcagcggtaaatccactaccgggcgggcgttgctgcgcctggtcgaatcgcagggcggcgaaattatctttaacggtcagcgaatcgataccttgtcacccggcaaacttcaggcattacgccgggatattcagtttatttttcaggacccttacgcttcgctggacccacgtcagaccatcggtgattcgattatcgaaccgctgcgtgtacacggtttattgccaggtaaagacgcggctgcacgcgttgcgtggttgctggagcgcgtgggcctgttacctgaacatgcctggcgttacccgcatgagttttccggcggtcagcgccagcgcatctgcattgctcgcgcgttggcattgaatccaaaagtgatcattgccgacgaagccgtttcggcgctggatgtttctattcgcgggcagattatcaacttgttgctcgatctccagcgtgatttcggcattgcgtatctgtttatctcccacgatatggcggtggtagagcggattagtcatcgtgtggcggtgatgtatctcgggcaaattgttgaaattggtccacggcgcgcggtcttcgaaaacccgcagcatccttatacgcgtaaattactggcggcagttccggtcgctgaaccgtcccgacaacgaccgcagcgtgtactgctgtcggacgatcttcccagcaatattcatctgcgtggcgaagaggtggcagccgtctcgttgcaatgcgtcgggccggggcattacgtcgcacaaccacaatcagaatacgcattcatgcgtagataacattcaggcggagaataaaatggcaagagctgtacaccgtagtgggttagtggcgctgggcattgcgacagcgttgatggcatcttgtgcattcgctgccaaagatgtggtggtggcggtaggatcgaatttcaccacgctcgatccgtatgacgcaaatgacacgttatctcaggccgtagcgaaatcgttttaccaggggctgttcggtctggataaagagatgaaactgaaaaacgtgctggcggagagttataccgtttccgatgacggcattacttacaccgtgaaattgcgggaaggcattaaattccaggatggcaccgatttcaacgccgcggcggtgaaagcgaatctggaccgggccagcgatccggcgaatcatcttaaacgctataacctgtataagaatattgctaaaacggaagcgatcgatccgacaacggtaaagattaccctcaaacagccgttctcagcgtttattaatattcttgcccatccggcgaccgcgatgatttcaccggcagcgctggaaaaatatggcaaggagattggtttttatccggtgggaaccggaccgtatgaactggatacctggaatcagaccgattttgtgaaggtgaaaaaattcgcgggttactggcagccaggattgcccaaactggacagcataacctggcgtccggtggcggataacaacacccgcgcggcaatgctgcaaaccggtgaagcgcagtttgctttccccattccttacgagcaggccacactgctggagaaaaacaaaaatatcgagttgatggccagtccgtcaattatgcagcgttatatcagtatgaacgtgacgcaaaagccgttcgataacccgaaggtccgtgaggcgctgaattacgccattaaccgtccggcgctggtgaaagttgcctttgcgggctatgcaacgccagctactggtgtggtaccgccaagtatcgcctacgcgcaaagttataaaccgtggccttacgatccagtgaaagcgcgcgaattactgaaagaggcgggatatcccaacggtttcagtaccacgctgtggtcgtcacataaccacagcaccgcgcagaaagtgctgcaatttacccagcagcagttagcgcaggtcgggattaaagcccaggtgactgcgatggatgccggacagcgggcggcagaagttgaaggtaaagggcaaaaagagagcggcgtgcggatgttctacactggctggtcggcttcaaccggcgaagcggactgggcactatcgccgctgtttgcctcgcagaactggccaccgacgctgtttaataccgcgttttacagcaataaacaggtggataacttcctggctcaggcactgaaaactaatgatccggcggaaaagacccgcttatataaggcggcgcaggatatcatctggcaagaatcgccgtggatcccgctggtggtagaaaaactggtgtcggcacacagtaaaaacctgaccggtttttggatcatgccagacaccggcttcagctttgaagacgcggatttgcaataagcaacgcagggagtggaatgcttaattacgttatcaaacgcttactggggttgattccgacgctgtttatcgtctcggtgctggtgtttttatttgtccatatgctgcccggcgatccggcgcgattgattgccgggcccgaagctgatgcgcaggttatagaactggtgcgtcagcagctggggttggatcagccgctgtatcaccagttctggcactatatcagcaatgctgtgcagggggattttggcctgtcgatggtgtcgcgtcgtccggttgccgatgagattgccagccgctttatgccaacgctgtggctgaccataaccagtatggtctgggcggttatatttggtatggcggcgggaattatcgccgccgtctggcgtaaccgttggccggatcgattgagtatgaccattgcggtgtcggggatctcgtttccggcatttgctctggggatgcttttaattcaggtattctccgttgaactgggctggctgcctaccgtgggagcagacagttggcagcactacattttaccctccctgacgctcggcgcggcagtggccgccgtgatggcgcgctttacccgcgcgtcgtttgtcgatgttttaagcgaagattatatgcgtaccgcgagggcgaaaggggtgagcgaaacctgggttgtcctcaaacacgggctacgtaacgcgatgatcccggtagtgaccatgatgggcttacagtttggctttttgctcggtggttccatcgttgtggagaaagttttcaactggccgggacttggacgcttactcgttgactccgtagaaatgcgtgattacccggtgattcaggcggaaattctgcttttctcgctggaatttattcttatcaacttagtggtggatgtgctttacgccgccattaacccggctatcaggtacaagtaaggatgcgactatttaactggcgacgtcaggcggtgttaaacgccatgccactggtcaaacctgaccaggtacgtacaccgtggcatgaattctggcgacgatttcgccgtcagcatatggcgatgaccgccgcattattcgttattttattgattgtggtggccatttttgcacgctggatcgctccctatgacgccgaaaattattttgattatgacaatctgaataacggaccttctttgcagcactggtttggcgtcgattcactggggcgtgacattttcagccgtgtcctggttggtgcgcaaatctcgctggcggcgggcgtgtttgccgtgtttatcggtgcggcgatcgggacgttgctgggcttgctcgctggatattatgaaggctggtgggatcggctgatcatgcgcatttgcgatgtgctgtttgccttcccgggtattttactggcgatcgctgttgttgcggtgttgggaagcggcattgctaacgtgattattgcagtcgccattttttccatccccgcgtttgcccgcctggtgcgcggcaacacgctggtgttgaaacagcaaacctttattgagtcagcacgcagtattggtgccagcgatatgaccgttttgttgcgtcatatcctgcctgggaccgtctcttctatcgtggtgtttttcaccatgcgcattggtacctcgattatctctgccgccagcctctcatttctcggcctcggtgcgcagccgccgacaccagagtggggagcaatgctcaatgaggctcgagcggatatggttatcgcgccgcatgtcgctgtttttccggccctggctatttttctgaccgtactggcgttcaatttgttgggcgatggtttacgcgatgcgctggatccgaaaattaaaggatagttacgtttgaatattgcttgaaagggtaatcacctcacaggaaattattgccctaagcaagtgttgtaactttctgctgattttgtagaatcgggtaatttggttaaaaagccgcagcaagggacaatttttgcagcggcacagcgttcagatagttattttgttaaatgtattaacatgctgagtttatacgaaaagataaagataaggctgataattttatttttattggcagcactgtcatttattggtctttttttcatcattaactatcaactggtatcggagcgcgcggtaaaacgtgccgatagccgctttgaacttattcagaaaaacgttggctatttctttaaagatattgaacgttcggccctgacattaaaggactcactgtatttattaaaaaatacagaggagattcaacgcgccgtgattcttaaaatggaaatgatgccatttttagactcggtgggactggtacttgatgataataaatattatcttttttcgcggagggcgaatgataaaatcgttgtttatcatcaggaacaagtaaatggaccgcttgtcgacgagtcagggcgggttatttttgccgattttaacccatcgaaacgaccgtggtcggtggcttcagatgactctaacaatagctggaatccggcatacaattgctttgatcgtccgggtaaaaaatgtatctcttttacgctacacatcaacggcaaagatcacgatttgttagcggtggataaaattcatgtcgatttaaactggcgatatctgaacgagtatcttgatcaaatcagcgctaatgatgaagttctatttttgaaacaaggccatgagatcattgccaagaatcaactcgctcgtgaaaaactgattatttataatagcgaaggtaattataatattattgattctgtcgatactgaatatatcgaaaaaacatcagcggtgccaaacaacgcattattcgaaatctatttttattatcctggcggtaatttattgaacgcatcagataaacttttttatctgccgtttgcgttcattattatcgtattgctggtggtttatttaatgaccactcgtgtgttccgtcggcaattttctgaaatgacagagctggttaatacgctggcatttttgcccgactcaacggatcaaatcgaggctctgaaaattcgcgaaggcgatgcgaaagagattatcagcattaaaaattcgatcgcggaaatgaaagatgccgaaattgaacggtcaaataaattgctctcactgatctcttacgatcaggaaagcggttttattaaaaatatggcgattattgagtccaacaataatcagtatctggctgtggggatcatcaaactgtgtggtctggaagccgtggaagcggtgtttggtgttgatgaacgcaataaaatcgtcaggaaattgtgtcagcgaattgccgagaaatatgcgcaatgctgcgatatcgtgacattcaatgccgatctctatttacttctgtgtcgggaaaatgtacagacatttacccgtaaaatagcgatggtaaacgattttgacagcagctttggctaccgcaatctgcgcatccataagtctgccatttgtgaacctttgcagggggaaaacgcctggagttacgcagaaaaactgaaactggcgatttccagtatccgtgaccatatgttctccgagtttattttctgtgatgacgcgaaactcaacgaaatagaagagaatatctggattgcgcgtaatattcgccatgcaatggaaattggcgaactattcctcgtctatcaaccgatcgttgatattaacacccgcgccattctgggcgcggaggcgttgtgccgttgggtttctgcggagcgggggatcatttcaccgctgaagttcattaccattgctgaagatatcgggtttatcaatgagctgggttatcagattattaaaacggcaatgggtgaattcagacattttagtcagcgtgcgtcgctgaaggatgatttcttactgcatattaatgtttcgccctggcagttaaacgaaccgcactttcatgagtgttttaccaccatcatgaaagaaaatggcctgaaggcgaacagcctctgtgttgagatcactgaaaccgtgatcgagcgaattaatgaacatttttatctcaatattgaacaactgcgtaaacaaggggtacggatatcgattgatgactttggcaccggtttgtcaaacctgaaacgtttttatgaaattaatccagacagcataaaggtggactcgcaatttaccggcgatattttcggtactgcgggaaaaattgtgcgcattattttcgatctggcacgctataaccggatcccggtgattgcggaaggcgtagagagcgaagacgttgcgcgcgaattaattaaattaggatgtgttcaggctcaggggtatctgtaccagaaacccatgccattctccgcctgggataaaagtggaaaattagtaaaagagtagtttacgtatgtccagaatcaataagttcgtacttacagtcagtctgctgatttttatcatgatttcagcagttgcctgcgggatctacactcaaatggtaaaggaacgggtgtatagcctgaaacagtccgttattgatactgcttttgcggtggcaaatattgctgaatatcggcgtagcgtggcaattgatcttatcaacacgctaaatcccacggaggaacagctgttggttggtttgcgcacagcttacgccgactcggtttccccctcttatttgtacgatgtcggtccttatctgatttccagtgacgaatgtattcaggtaaaggagttcgagaaaaattattgtgcagatattatgcaggttgtgaagtatcgacatgtcaaaaatacagggtttatctcttttgacggtaaaaccttcgtctattacctctatccggtaactcacaatcgtagtctgatatttttgcttggtctggagcgtttttctttactgtcaaaatcgctggcgatggacagcgagaacctgatgttctctctatttaagaacggtaaaccggtgaccggtgatgaatataatgctaaaaacgccatcttcaccgtttcggaagcgatggagcacttcgcctatttgccgaccggattgtatgtatttgcgtataaaaaagatgtttatttgcgggtttgtacattgattattttctttgccgcattggtggcagtgatatcgggtgccagttgcctctatctggtacgcagagtgattaatcgtggtattgtggagaaagaagccatcattaataaccattttgaacgcgtactggatggcgggcttttcttttcggctgccgatgtcaaaaaactctacagtatgtataactcggcgttcctggacgacctgaccaaagcaatgggcagaaaatcctttgacgaagatttaaaagcgctgccggaaaaaggcggttatttgtgcctgtttgacgtcgataaattcaaaaacattaacgacaccttcggtcatttgctgggcgatgaagtgttgatgaaagtggtgaaaatccttaaatcacagatcccggtagataaaggtaaagtctaccgcttcggcggtgacgaatttgcggtgatttatacgggtggaacgctggaagagttgctatcgattctaaaagaaatcgttcatttccaggtgggaagcattaatttaagtaccagtatcggtgtagcacattcaaatgaatgtcctaccgtcgaacgcttgaaaatgctggcggatgagcggctgtataagagtaagaaaaacggcagggcacagattagctggcagtaatcattattcgcaggccggacaaatgattttgcccggcctgaattaattaaacccggctaccccacaaatcgtactcatcggcgtgctcgactttcacacgcaggatatcacccggcttaacgttggtttcaccattgagataaaccgcgccgtcgatttccggtgcatctgccatgctgcgaccaattgcgccttcttcgtccacttcgtcgataatcaccagaatttcacggcccactttctcttgcaggcgctcggcggaaatctgctgctgcagctgcatgaaacggttccagcgttcttctttcacttcttccggaacctggtcaggcagggcattggcgtctgcaccttcaaccgggctgtatttaaagcagccaacgcgatccagacgcgcttctttcaggaagtcgagtagcatctggaaatcttcttccgtctcgccagggaagccgacaataaaggttgagcgtagggtcagttccgggcagatttcgcgccactgtttgatgcgcgccagttggcgatctacagaacccggacgcttcatcagtttgagaatgcgcgggctggcgtgctgcaacggaatgtccagatacggcaggattttgccttctgccatcagtgggatgacgtcgtccacatgcggataagggtaaacgtagtgcagacgtgtccagatccccagtttcgataactgttcgcacaggctgaccatgctggtttttaccggctcgccgttgtggaagccagtacgatgtttaacatcaacgccataggcggaagtatcctgcgagatcaccagaatctctttaacgcccgcatctaccagacgtttcgcttcacttaacacttcgccaatcggacggctcaccaggtcgccgcgcatagacggaataatgcagaaggtgcagcggtgattacagccttcagaaattttcagataggcataatgacgcggcgtcagtttcacaccttgttctggcaccaggctcaggaatgggttgtgtttcggtttcggcacgtagtgatgaacgtgctccagaacctgctcatagctatgaggcccggtgatttccagcactttcgggtggacttcgcggatctgatcttcttttgcccccagacaaccggtcacaataaccttgccgttttcattcaacgcttcaccaatggcttccagtgattcttgtaccgcgctgtcaataaagccgcaggtgttgacgatcaccatgtccgcatcgtcatagctcggtaccacgtcataaccttcagtgcggagttcggtgagaatacgctctgaatcaacaaggtttttcggacagccaagggaaacaaagccgattttcggctggggagttactttgctcatagcttaaaaaatattcagttacaggaaaggtcagggcagggattctacagagttctggataaaatttgtatcgcaatctcattcgctggcggaggcgaaggaaatgtaaattttgttaattcggcgtgaagaattgatcctggacagcattttgctcaaaaaatagccatactatttaattgcaacaaggctggaaagaggaggatcgaagtatgttcgttgacagacagcgaatcgatctgctgaaccggttgatcgacgcacgcgttgacctcgccgcatacgtgcaactgaggaaggcaaaaggatacatgtccgtcagcgaaagcaatcatctacgagataacttttttaaactgaatcgcgaactgcacgataaatcgctgcggttgaatcttcatctggatcaggaagagtggagtgctcttcatcatgctgaagaagcattagcgacagccgcagtatgtttgatgagtgggcaccatgattgcccgactgttattaccgtcaacgccgataagcttgaaaattgtctgatgagcttaacgctgagtatccagagcctgcagaagcacgccatgcttgagaaggcctgaaaactaagggggagaaagcgtctcccccttcatgtttaagtttttgtaaaaatgaatttgttatctcctccactgactacgctttaagccagagtcaatccggaggcgttatgcatcgaccattctttttccttgtgccccttatttgtctttcttccgctctctgggcggctcctgcaacggtaaatgtcgaagtactgcaagacaaactcgaccatccctggtcactggcctttttacccgataatcacggtatgttaatcactctgcgcggcggcgagttgcgtcactggcaagcaggaaaaggattatctgcgccgctttccggagtgccggacgtttgggcgcacgggcagggcggcctgctggacgtggttttagcgcctgattttgctcagtctcgccgcatctggttaagttattccgaagttggcgatgatggcaaagccggaactgctgtgggttatggccgcttaagtgatgatctctcaaaagtgaccgacttccgcaccgtctttcgccagatgccaaaactgtctaccggcaaccattttggcgggcggctggtattcgacggtaaaggttatctttttattgctctgggcgaaaacaatcagcgcccgacggcgcaggatctggataaattacagggcaaactggtgcgtctgaccgaccagggcgaaatcccggatgataatccttttataaaggaatccggtgcgcgcgccgagatctggtcttatggcattcgtaatccgcaaggaatggcgatgaatccgtggagtaatgcactgtggctgaatgaacatggcccgcgcggtggtgatgaaattaatatcccgcaaaaaggcaaaaactacggctggccgctggcaacctggggaatcaactattcaggctttaagataccggaagcgaaaggggagatcgtcgccgggaccgagcaacctgttttttactggaaagattcgcccgctgtgagcggcatggccttctataacagcgataaattcccccagtggcagcaaaaattatttattggcgcgctgaaagataaagatgtcattgtgatgagcgtcaacggcgacaaagtgacagaagatggccgtattttaacggacagagggcagcgaattcgtgatgttcgcactggacccgacggttatttatacgttctcaccgacgagtccagtggggaattacttaaagttagcccacgcaattagctaacgggaatcatcaccactttgcgcactgcggggcgttcagtgagttgctgataccagcgttgcagatttggacgcggtgtccaggtcaggccaacgttaaacaaattgtagatgaacggtgcgatagcgatatcgcccacaccaaactcgtcgccagagaaccattttacttttgccagttccgcatcgagcagggcaaacagggcgtcgcactctttgcaactggcatcaatggcggcctgatcgcgctcttccggtggtgttctgactaatcccatcaggatcccgcgatgagcattactgagcgtctggtttgcccagtccatccatttttccgcttccgcacgacgtgccggtgagtcgatccacaggcgtttttgcccgtactgtgccgccagatagcggacaatggcgtttgattcccaaagaatgagatcactttcgtcgtcacgcaacaacggcaccagcccgttagggttcatcgccagaaaatcagcatcgtgatttatcccaaactcacggcccgcgagaatttgctcataaggtagttccagttcttcgagcgtcagcaatactttttttacgttagttgaattattccgaccccacagcgtaatcatactcaccccttttccgacaggcagccacaggctgaacaggactccgatggtgaagtaaagttaacttttaagcaacagctggcaaaaaaatgacaccagaagcagcgaagcggcaggatattgcataaactttaaaaactttaccaacttacggtttctttaagtttgtgtgtgcgttattaatcaccaaacttatcatacggcgatataacgtattttttttgaatggatactcgggtggcatttatgacgcaatactcctctctccttcgtggtcttgcagcgggttctgcatttttattcctttttgccccaacggcattcgcggcggaacaaaccgttgaagcgccgagcgtggatgcgcgtgcatggattttaatggattacgccagcggtaaagtgctggcagaaggcaacgcggatgagaaactggatcccgcgagcctgactaaaatcatgaccagctatgtggttgggcaggcgcttaaggccgataagattaaactcaccgatatggtgacggtcggtaaagatgcctgggcgacgggaaatccggcactgcgtggttcatcggtaatgttcctcaaaccgggcgatcaggtttcggtggcagacttgaacaaaggtgtgattatccagtccggtaatgacgcctgtattgcgctggccgattacgttgccgggagccaggagtcatttattggtttgatgaatggttatgccaaaaaactgggtctgaccaacactaccttccagacggtgcacggtctggatgcgccggggcagttcagtaccgcgcgcgatatggcattgctgggtaaagcattgatccacgatgtgccggaagagtacgccattcataaagagaaagagttcaccttcaacaaaattcgtcagcctaaccgtaaccgtctgctgtggagcagcaatctgaatgttgatggcatgaagacaggaaccacggcaggtgcgggatataatctggttgcttcggctacccagggtgatatgcgtttaatctccgtagtgctgggggcgaaaactgaccgtatccgttttaatgagtctgagaaattattgacctggggtttccgcttctttgaaaccgtgacgccaattaaacctgatgccacctttgtgactcagcgcgtctggtttggtgataagagcgaagtgaatctcggggcaggtgaagcgggctcagtgaccataccgcgtgggcagctgaaaaacctgaaagcgagttatacgttaacggaaccgcagcttaccgcaccgctgaaaaaaggtcaggttgtcgggaccattgatttccagcttaacggtaaatccattgagcagcgtccgctgatcgtgatggaaaatgtggaagagggcggattctttggtcgggtgtgggatttcgtgatgatgaaattccatcagtggttcggcagctggttctcttaatcttctgataaccggatggcgcgaaacgtcatccggttatacgtcattaatacatcaacttaatgcgctgcgtctgcgcgtacttcacatactcatcttccgggcaacaatcgctcaccacaatatcaaagcgtttcaggtcacccatgcgcgccggacgcaccttgccaaatttactgtggtcgacaaccagcacatgcttttgcgccatcgacatggcccagtgttttaccggcaactcttcaagattaaaacaggtagcgcctttactgacatgcacgcccgccgcagaatagaaagcgatatccgggcaaaaattattcagcgtttgctgaaaatcgatgggtttgaaaatggcgttgctggcgtgaaattcaccaccgcaaagaaacgcgcggcaatggggtttctctttcagcgccagaaaggtatttagcgaataacaaacggcggtaaaagggatttcattatcaatcgcttcaataatccacggcgtggtggtgccacagtcaaaaaagagggtctgatcgggttctaccagcgtcgcagccagttttgccgcccggcgtttttcttccaccaggcgggatttttgatcgcttaacaggtaatggctggcactgcgcggttccagaacaatatagccgccgagcaaaacgacgggcgcactgtggttgttcagatcgcgacgaatcgtcatctccgaaaccccaagcagggcggcggcgtctttaagatgtaacttatcgctgcgttttaattcttgcagcagctgcccgatacgctcttcgcgacgtgtttccataatccctctgaatagttattgaagcgagccgctcaatactacactttttagcagagatcagtcacgcacccagcctttgcggatcggtaatgcaaaacagacgcgataccacgattgcagacgttgatagagtttatgccccatcgcttgccagataatctgggcactaaggcagccaatcatacctgccagcaatccaccgagcatatccagcggccagtggacgccaagataaacgcgcgaccaggcaatgacgacggccagcaccattaaaagtgagccggaccacaggcgatgccagcataaaaatgccagtgcaaaggtgaaaatcaccgtaccgtgatcgcttgggaatgagtcatccgccgcatgatgcaggaagttatagccgatattttcgacaaagggtcggtcgtgcggaaaaagatgtcccatcgtccaggacacaaacaggctgaccgccagcgcgatagcgatttttatcaccagttgccgttgtgctgtaagcccccacaaccaaagtaccacggccagcaacggcaccacggtaatcaaatctttagcaataaaaatcgccaacgagatcatccacggagccgagtctggcgtcgcgttaataagagagaatagagagagattcaaattttccagcataacttcccgacgcaaagtgattaaaagggagccaatacaggcaagtcgttgagaataaagtgcaggttaaactgggtaaagcggcatcgtcttatttccctcaagcggcctgtttacggtgggtgattgtaacgggcataggttaaataaaacttaaagaaagcgtagctatactcgcaataatgtaagaatgtgcttaaccgtggtttcagctacaaaattcgctttctcgttagctgcgcttttattaaactctgcgcgattattattggcgaagaaattgcatgcaaaataaattagcttccggtgccaggcttggacgtcaggcgttacttttccctctctgtctggtgctttacgaattttcaacctatatcggcaacgatatgattcaacccggtatgttggccgtggtggaacaatatcaggcgggcattgattgggttcctacttcgatgaccgcgtatctggcgggcgggatgtttttacaatggctgctggggccgctgtcggatcgtattggtcgccgtccggtgatgctggcgggagtggtgtggtttatcgtcacctgtctggcaatattgctggcgcaaaacattgaacaattcaccctgttgcgcttcttgcagggcataagcctctgtttcattggcgctgtgggatacgccgcaattcaggaatccttcgaagaggcggtttgtatcaagatcaccgcgctgatggcgaacgtggcgctgattgctccgctacttggtccgctggtgggcgcggcgtggatccatgtgctgccctgggaagggatgttcgtcttgtttgccgcattggcagcgatctcctttttcggtctgcaacgagccatgcctgaaaccgccacgcgtataggcgagaaactgtcactgaaagaactcggtcgtgactataagctggtgctgaagaacggccgctttgtggcgggggcgctggcgctgggattcgttagcctgccattgctggcgtggatcgcccagtcgccgattatcatcattactggcgagcagttgagcagctatgaatatggcttgctgcaggtgcctattttcggggcgttaattgcgggtaacttgctgttagcgcgtctgacctcgcgccgcaccgtacgttcgctgataattatgggcggctggccgattatgattggtctgttggtcgctgctgcggcaacggttatctcatcgcacgcgtatttatggatgactgccgggttaagtatttatgctttcggtattggtctggcgaatgcgggactggtgcgattaaccctgtttgccagcgatatgagtaaaggtacggtttctgcggcgatgggaatgctgcaaatgctgatttttaccgtcggtattgaaatcagcaaacatgcctggctgaacgggggcaacggactgtttaatctcttcaaccttgtaaacggaattttgtggctgtcgctgatggttatctttttaaaagataaacagatgggaaattctcacgaagggtaaaaaaatgcctgattgctttgtgcgatcaggcattctcgaattaatggtgatggtcgtcaatctggtgttcgataaccatcccttcacctacgctggcaagatggcgaacataaggatgcgggcggtaagccggagctggcgcaggagccacatagacggtttgcggcacagtcgcgacgctgaccgcttgtggaacgctgactgaatcaggaaccacaaccactttgtatccactcggcacatcgacggtgacactttgcgccatcgccacaccagtaaagcccattaaaagcgcgcccaacagtagacaatttttcataaacatttcgcctgaaataatgcagcgggttaatttccgcgaattatgcagccttcattcaggtattgtgttgccgggcgtgctgccgtttttattggtcaaatggcgcttcgtgtttaagaactttatcgatcacatccagtacgccttcacggttattggagcctgcccggtattttgccgctgcgacgaccgcgttgccggcattttccattgcaaaactaaagcctgcctgacgcagcatctcaatatcgttaccgccatcgccaaagaccaccacttcgctgtcgtctattccccataatttctgcagttggcgaaggccattggctttatgtacgccggggataatcagatcgatgctgccgttgccggtgtggaccgacaccataatatcgccgatggcctcatgtaatgctttttgtacttgtggaatcagttcatcggaaagattcaggccaaacttaaagaagatatcctctaagttgtcaaagttatcgacgtattccagacggtgataatacatttccgccaccgttttcatggcatcgtcatattttttgagtgtataggcactattttttccgcaggcaataatttccacttccgggcgcgtcagcaaatgttccacgacagtagcaaacgcatccttcgatagctcgccattaaaaacatctttgccttcgctcactacccagccgccgttttcagccacaaaggcaatttcattagcaatttcagggaagaaagagatcaactgataatattgattcccgctggcgactacaaagcgaattccttgtgctttcatttgctgatactgagccataaaccgctcacggttataggttttttgatcgcttaagaaagtaccatccatgtctaccgcaattaatttaatgctcatcaactattctccatcgccgtctgcgttttggtatcgggtttggcgacggctttcgcgacaatagccgcgagaataaccagcgccagtacaaccagcattgcactacgtaatccataatgttcgccgagatagcccagcagcggcggcccgacgaggaaagccagataaccggtcgttgctaccacactgacgcgggttggtgcatcggggccggtatcgctggcggcagaaatggtcagcgggaagcccagcgaggcacccagtccccagagtacaacagacaccccagcgacccaggcgctatcgacaaaaataatcagcccaatacccaacgcccccattagtgcactggcccgaaccacggcaacgcgactgtaacggtcgatgaaccaaccgccggtgaagcgtccaacggtcatccccagggtaaaaccggcataaatcagcgagccggaagtagggctaaaaccgtgaccgtcaaccattaataagggtaaccagtcgttggcagaaccttcggcaaaggccatcgccagcaccacaacacctatcagcagcaactggatatcgcgataaaaaggtacgcctttttcgccatgctgggtgccatcggcagcatttttgcccgtaccgtcagggattgcctgaatggcgatataaataggtgcgatacctaccagcgccgccaataaaatgtgcaccgttgccggaacgccaaaggccgtcagtgccatcccgacacctgcgcctgccagcgtgcccaggctataaaaaccgtgcatcatcggcaaaaccgtcttattcatttctcgctcaacggcagcaccttcaacgtttatcgccacttccgcagaaccaaaacttgccccaaagacgccgagaccaacggcaaagagcaggggcgatgtcagccagagtgccagacttaatatcatcatcccgatcaatgcgcaggacatcgtgaccaggatgacattacgtgtcccaaagcgtttcactaaccacgccgagcagagaataccgctcatcgaaccgatcgacagaccaaagagaacaccgcccatttcagcgatcgagacagagagaatatcgcggatagcaggcgtacgggttgcccaggacgccattaacaggcctggcaaaaagaagaacataaacagcgcccaggttcggcgtttcaatgcattacgtgaagaatttacggtcatagatcacgtcaaaataagaagagggaagacaacattagcaaggttgtgtacatttgtacacaattgcagagagaggaaatgacatgcgtcgcgctaacgatccgcaacggcgagaaaaaattatccaggccacgctggaggcggtgaaactttacggaatacatgctgttacgcaccgcaaaattgctacccttgccggggtaccgttgggatcgatgacctactatttttcaggaattgatgagttgttactggaggcgttcagcagttttactgagatcatgtcccggcaatatcaggcattttttagcgatgttagtgatgctccgggcgcatgccaggctatcaccgatatgatctacagctcacaggttgcaacgccggataacatggagctgatgtaccagctctacgcgctggctagccgaaaaccgctattaaaaacggtaatgcaaaactggatgcagcgcagtcagcaaacgctcgaacaatggtttgaacccggaaccgcccgcgcgcttgatgcgtttattgaggggatgacgctgcattttgtcaccgaccgtaagccgctatcgcgcgaggagattttgaggatggttgagagggttgcagggtagtagataagttttagataacaaaaaacccatttatgtaaacgggttaatgaaaacaataagttagagtaaaaacaataagttgggttggtggtcagtggtggttattacggggtaatgccaaccgctgccgccactttgtcgccacttgttttaccttagacgccatgggcctttttcttcaacctgctcgactaaaccttcgtcttctagttcacgcaataacgcaacaacccaatattgttggttcgaacttgttgcttttcgtttttctccccaatctaggccactaaggcgaaatacttcagcttgtttaacccctttaccgtttttttgaccatctgggtgagttctgagtacggataaagccaattctttggctttgctgcgtagctcagctccctgatgctgtaactcattcattggtcgtgctccatgtgaaagaaaaaagaatattagctcaatagggcagaacacgcattttcaaacagttgctgttgatgttggtagtgttgccagcggattaaaccgtaatgcagtttccaggtgatccggtgccagatgtgcgtaacgcatggtcatttttatgtcgtgatgtccgaggattttttgcaaagcaaggatatttccacccgacatcatgaaatgcgccgcaaacgtatggcgcagaacgtgtgtcagttgaccgcgagggagcacgatagacgttttttccatcacggataaaaattgaaaatagcagtctgtgaagaaattgaacccatcaagcgccatgatctcttcgtaaagctctttactgatagggatgcttctgtttttcttccccttcgttcttacaaaggtaattcggtatttggtcacctgtgagcgggtaagatttacggcttcacgccagcgtgcgcctgtgcttaagcatatcttaactaccagtgccagaattgggtcctgacgtttgcaatcagccagcaattcaacaatctgctcatgggtaagccatgccatctctttttctgcgatggtgaattttcgcatgttctccagtgggttcggatacgaccattcgcccagacgggatagttcgctaaaaacactacttagatagctttgctccaggttaatggtgaccgggcttgctcctttcttccatttctcgctgaagtagatctcgcctgtcaggcgtttatctcgatagtgggcaaacattttagaggtgagatcggttgcaagaggattgcctagagcgtcaaccatcaacagcaatttgtcatagacatgctgcccagctgtcagagatttaccatgtagtttgaaccatagctcaaccacgtctttcagtgttcgacgatccactgattcacccagccagggctttgcttcggtttcttccatcgtgtgacgctcaaaagccagtgcttcgcctttggtggcgaattgtttacgcacacgacgcccactacgtccggcggggtaacattcgcaaagccattttcctgtggtgagttttcgtactgccataaaaaatgccctccagtggagagcatttttactgtatatataatcagtgtcaatgtatgaaatcagtcaattatacatctttagttgagcattaaaacttcaatggcggacgaaacaagttttcggggaggaacagtatttaagcccttttgaaagaaactataggtagcatgttcagtccatttttttctggtttcatcatcctttataaagaatggagatgttgcatcaatatagtctagtacgatcccataaatagcatattcagtattatctacactataaatatcctcatcataacttaaatattcaaagcctaatgttttgatagtactttctgcatccacagaattatctagatagcttaatgccaaagggcgatttagagaatatagcatcactcctaacgttcggtataatgaataaccaaatattttttctggaccaattccagattgagatagcacctgatatatttcaaaatggcgcgataatgtttctacttcacgtaaagacaacttagctctttgtattatcgtttttataatatgcccgcattcttcgtttacttcttgcagtctttgagaatcattttttaatatttcccataaagcgacagatgcgtatgcaggtgtatagttgtctggtttaaatgtatcgggcaatacaaatgtaaattttatgaatttgtctaaatactgttctgcatttatggataaaccatacagatggcttattgatgctttgagttgttgagtctttgcaaccaaaacaaaattcaagttttttatttcaaaaatgtgtttaatattttctatgattgaaagagcgaatgtaggtttacatctgtccagttcgtctataataatcgttattttaaatttctctgtaagttgcgaaattgtatttctcaatgtctcgatgtttttctgtgcttctatatgatcgtctaataatgtttcaattgtactgtcgattgcactcgaagtggcttctttgatagcatcttcgaagccatcaacaatgtcatctgcattttgttttaacacccatccagtgccagctttgaaaatggttttcaaaccaaaacgtattgctggtagtgttttgcttatcaactcttttcgtttgtcttcgggcaaaagtgcagcaacacctgccattaacgtcaaaatgggggcatcattatgatcttcagcgaaagcatcaatgtaaactactttatgtttttgattattgttttcaattagatttgcaacttttttgcaaaactctgtttttcccgtgccccatccgccatctataaccagcggagataagttaatatcagagttcagtagagctattaatttttcagcaataggcttacgaaggaactcatcacgataatcaaacgtatattcaataggcatttagaactccagttatttaatatattgagtactaaaatttttctgctcttcttagtatgcagcaccacacaattccaataacctgtatttcatctctggaacactcaaagccacgatttcctccttcaacatataacctgttattaggtaagcgggtcagggttcggaccgaaattttttcgtctatgcctattagccacaatccatcgcttatgtcattatattcaaagctacatatgtattcgttatccagatcttgaatgatgaacggattacatattttttcaggtaagaatgttttatcaaaaatatatgctccatcttcaattaacgttcctgaaattaattttttctttggtaccaaaatttgtgcatttatatttgagggttttttgtcccctataccgaatgccaaccattctagtggataaccagtttcaatagcacattgcaaaacccaatctgcagggaagatgtctcgcatgtaacgtgtagccatggtgctcttggatactcccaaatgatcgcaaagagcttgtctcgtagagaacccgtacgcctcaactagacgttcaatgactttcttaccaccgctgctgaaatccatgagtcctccaaggaaatccaaaattcgttgacagattccaaaagcgatcttaaagttgaaccagaagtgttcttttggagccttcactactaatcacgacaaactacggctcgccacaagccatatctataaggaatgttgccttatgacacctaacatttcaattactctgaatacaccacatgtcacgatcgaacgttatagcgaactgacaggcctttctattgatacgattaacgatatgttggctgatggccgactacctcgtcatcgtcttcgaaaagacaaaaaacgtgaaaaggtaatgattaacctggttgctctgacagttgatgctttgtctgcttaataaccgtctactttcgcaataagacggtgagttcgattttgcgataagttcggagttgaaaactatgtttgattataaagtttccaaacatccacattttgatgaagcctgtcgtgcatttgcactgcgccacaacctggtgcaactggcagaacgtgcaggcatgaatgtacagattctgcggaacaagctgaacccagctcaacctcatttattaaccgcaccagaaatctggctgcttaccgatctgactgaagattcaacgctggtagatggttttctggcacagattcattgtctgccatgtgttccgattaatgaggtagcgaaagagaaactgccgcattacgttatgagtgcaactgcagagatagggcgtgtcgcggcaggtgcggtttctggcgatgtaaaaaccagtgcaggccgtcgtgatgcgatcagcagcattaactctgttacacgactgatggcgctggctgctgtttcattgcaggcccgtttacaggctaatcctgcgatggcgagtgcagttgataccgtgactggcctcggtgcctcattcggtttgctgtgaggtgcttatgctgacgaaagaaccatcatttgcatcgctgctggtaaaacaaagcccggcaatgcactacggtcacggctggatcatgggggaggatggtaaacgctggcatccgtgccgttcacaggatgaattgctggcagaactatctacgaaaaaacgggggaacaaatggctattgaaggcgctgcggcaactgttccattaagccccggtgaacgcctgaatggacttaatcacattgcggagttaagggcgaaagtttttggcctgaatattgagtcagagcttgagcggtttattaaagatatgcgtgatccacgggatatcaataatgaacaaaataaacgagcactggctgccatattctttatggcaaaaattccagctgaacgtcatagcatcagcattaatgagctgaccactgacgaaaagcgggagctgattaaagcaatgaatcattttcgtgcagtggtgagcttatttcccagacggctaaccatgccgaattaaccaactaatgaaattaatggcgtaaacccgccgggcatccctttatctaaattcaggagaattgattatgcgtaatattgaaaccctcacgactaaaaccggaccggatgacgcagggcttaatattttactgacagaggctcgtctggaagaacgccgggcaagggctgaagcaatggcagctcgccttgatagcctggcgtgtcatatctcatcccgtcagctaaaccacgtggaagcggcagaactgctgcgtgtgactgctgaagcaatccagaacgaagcgcaggagatccactaatggctgatgcaatggatctcgtacagcagcgcgttgaagaagaacgccagcgccatatccgtgctgcccgtgccaaaacgccgggtgtgtcccgcgtgctttgcgttgagtgtgaagcgccaattccgccagcacgccgccgtgccattccgggtgtgcagctttgcattacatgtcaggaaatcgcagagctgaaaggcaaacattacaacggaggtgctgtatgagcaccatcttgaaatgggcgggaaataaaaccgccgtaatgtccgaactgaaaaaacatcttcctgctggtccgcgactagttgaacctttcgcgggttcctgtgctgtgatgatggagacggattatccctgctatctggttgcggatattaatcctgatttaatcaacctctataaaaaggttgccgctgattgtgaatcgtttatatctcgcgccaaagttttatttgagatcgcaaacagggaggtggcttattacaacataaggcaggagtttaattactcaactgaaattactgatttcatgaaagcggtatatttcctgtatctcaatcgtcacggttaccgtgggttatgtcgctataacaagagcgggcatttcaacattccctacggtaattataaaaatccgtatttccctgaaaaagaaattcgcgcttttgcagaaaaagcccagcgagcaacgtttatctgcgccagctttgatgaaacgctggcgatgttgaaggcgggggatgtggtgtattgcgatccgccttatgacggtacgttttccggctatcacgctgacggctttactgaagatgaccagtatcacctggcatccgttcttgaacatcggtcatcagaaggacatccggtcattgtttctaacagtgacacatccctgatccgttcgctgtatcgcaattttactcaccactatatcaaggtaaaacgcagcatcggcgtagcagctggtgagagtaaatcagcaacagaaatcattgctgtttccgggccgcgctgctgggtgggatttgattattcgcgtggcgtggatagttctgccgtgtacggagtacgtgcatgagccatgccgatatgagcaactgctgcggctttaacgaggctgccgcatcgttctcatggaacagcccgaaaaaggccattaacccttatctggacccggcggaagttgcgccggtttctgcgctttcaaacctgatcactctgtacgctgccgataacgagcaggaacaactgcgccgcgaggcactgagtgatcaggtctgggagcgttatttctttaatgaatcccgtgatcctgtccaacgcgaaatagagcaggataagctcattagccgggcaaagttggcgcatgagcagcagcgttttaacccggacatggtcattctggcagacgtcagcgcccagccctcccatatcagcaagccgctgatgcaacgtattgaatacttcagcagcctgggcaggccaaaggcttattcccgctatttacgtgagacgattaagccatgtctggaacgactggagcatgtacgcgacagccagctatctgcatcttttcgttttatggcaagccatgtagggctggacggcctgctgattctgcctgaaatgagtcaggatcaggtgaaacgcctgtctacccttgtcgctgcgcatatgagcatgtgccttgatgcagcttgtggtgatttgtatgccaccgatgacgttaagccagaagaaatccgcaagacatgggaaaaggtggcagcggaaaccctgcgtctggatgtcatcccgcctgcgtttgagcaactccgtcggaaaagaaaccgccgtaaacccgtgccctatgaactcattccgggttcgctggcgcgtatgttgtgcgccgactggtggtaccggaaattatggaaaatgcgttgcgaatggcgggaagagcagttgcgtgctgtctgcctggtcagcaaaaaagcatctccctatgtcagctatgaagccgtgatgcataaacgtgagcagcgccgcaagtcactggagtttttccgttctcatgaactggtgaacgaagagggcgacacgctggatatggaagacgtggtaaacgccagcagcagcaacccggcgcaccgccgcaatgagatgatggcctgtgttaaaggtctggagcttatcgcggaaatgcgcggtgactgcgccgttttctacaccattacctgtccgtcacgtttccattccacgctcaataacggcagaccaaacccaacctggacaaatgcgacggtaagacaaagcagcgattatctggtcggcatgtttgctgcatttcgtaaggcgatgcacaaagccgggttgcgctggtatggcgtgcgggtggctgagccgcatcatgacggtacagttcactggcacctgttgtgtttcatgcgcaaaaaagaccgccgcgccattactgcattgttgcgtaagtttgccatccgtgaagaccgcgaggaactgggtaataacactggtccacgctttaaatctgagctgataaacccgcgcaaaggaacgccgacaagctacatcgcgaaatacatcagtaagaacattgacgggcgtggtctggctggcgagatcagcaaggaaacgggtaaatccctgcgtgataacgctgaatacgttaatgcctgggcgtctctgcatcgtgttcagcaattccgcttctttggtattccgggacgtcaggcttaccgtgaacttcgcttgctggctggtcaggcggcaaggcaacagggtgacaaaaaagcaggtgcgccggtactggataacccgcgtcttgatgccattctggctgctgctgatgctggttgttttgccacctacatcatgaagcagggcggcgtactggttccccgcaaatatcacctcatcagaaccgcttatgaaatcaacgaagagccaaccgcctatggcgatcacggtattcgtatttatggcatctggtcacccattgcagagggcaagatctgcactcatgcagtgaagtggaaaatggttcgtaaggccgttgacgttcaggaggcggcagccgaccagggcgcttgcgccccttggactcgtggcaataactgtccccttgctgaaaatttgaaccaacaggagaaagataaatcagctgatggggacaccagaacggatattacccgcatggatgacaaggagttgcacgattttctgcacagtatgaacaaaaaagagcgccgggaactggctgcaaggttacgcctggtgaaaccgaaacggcgtagaaactacaaacagcgaattacagaccatcaacgacagcagctcgtctatgaactgaagtccagaggatttgatggcagcgagaaagaggtagatttactccttcgcggtggcagtattccgtcaggagcaggcctgcgtatcttctatcggaaccagcgtctgaaggaagatgataagtggcggaacctgtattaattacgcgggttaacaattcgtgctcttaataataccaggcatatcaggccgatgaacgtaaaaaaacgttttacatcagtaagattattatatactgtaaatataaacagtggttatgtatacagtattgctttggtgttataggaggaaagatgcaggactattttttggagtctttgaagctccagcgcattgatttttttcttaagcttgtagcggctagtgagtgtagtgatgaagagaaggggctggccctgcagtgggtttctgaactgacagatgaactcatggcaaaaatcagaacccacgaatacaaccgctcaatggatgtcatcagctgaggtgacttttatgcgcattgaaataatgatcgataaagagcagaagattagccagtctacactggacgcccttgaatccgagctttaccgcaatctgcgccccctgtatcccaaaacggtaattcgtatccgcaaaggtagctctaacggtgtggaactgaccggactgcaactggacgaagaaagaaaacaagtgatgaaaattatgcagaaggtgtgggaagacgacagctggctgcattaagaaacgttgctggcgtctgaaattgcttctggcgtcagcaaggttgaacaacgagtacagtgaggcgttaggtgtggcgtttatttgatgagtgaacgcccgttctgcgacaggtttggagattaaggttgaaactacgggcaaaataccatctttttcctacttaattgagtccagtaacaagttacagttactctcattgtagagagaacgagcaattagtgttacctgctttccattcattcccggcttatcccataacacagcttcttgcgacgccacaaattcagcataatcaattatgcgttgttcgtgatctggttcctcatagccaaagtatgagagcgcatcgttgtaagcgtggtaagctgctttctgtaatatcttgatatcggctgtaggtacttgctccgtgtagctaggatctaattgtgtgctactgccatagaatgcacatgaaaggtaagatattgatttctgttgagctttagttcctttctcatagtttttagctgttaccgcctgaactgggacgctaacaaagcttgcaaccagaattaaaattaatacgtaaaagcttttcattttgacctcagccgaaacgttagagagactatcgaagtttgtaaaacccgtggcgattcagtttgagatcctcccccttacatgatttttaatcaaatatatgcttttgtaagcatacctgttaaccgaattattcatttttagagatcttccgacatactgattatgcccgctgaggagttcaccttgcgtaaagtccgattcgctttactcgtctgtgcatgtctatgctgcatgagattgcatgatcgtttgaggatcgtttttgctaaggcccgccagaactggcgggcttttgcgtagattatgcacctgcatgaaaaccactacataaagcgggcaggcgtggcggggatacgagcgcgcgctcgctaagctttgtaacacattgagtcaagtcactttttagacgcaaatggcttgcaaactttttcaacattaaggtaatttgttagatattgatggaaaaaattaagacaagagcgattttcaattgcttttgggttgactaggtgcatgttatgacaagtggtgtcccagtggtgctttctgactttgagttaaagtcgatcttagccttaactgaacgttttacgtggcatatcgccagaccaattattgcttctttagggctacctacaggtagagggcgtgaagcaacaaacgacaaaatactagaaagcctcattgattttaaaaagaaagataggcaaaaatttgacaaaatcattgcaagtgtaaatgatttagtctttgggcaggttgtttatggtgaaaaagcaatatttagtttgtctgtagatagtcaagtaattaaattacttgatgatagatatgctctccaatggaatatgatgaagcaaccaacatcattagtcgaaacgattgttgatgatgttcaattacagcatgctattaaaaatcaacttgagcttgttaattactctaagcaaaatactcagtctattttggtattttcatctatcagggagctggttgtaagagagaaagtccctccgtcaaagttagcagcatacaaacagtttgatgaaatcattgcgaagagaaaagaaaaacgtcagtgttttgatgtgtgtatattagattcagcttcaaataaaatccatgtattaattgatactaatggtaatgttgttggtgataatatcgtttttgcgaaaacgaattttattcgtgagttatataattgcgcaggttatcaatttaattcatcggaaaaggatttttatccattaattgagccaattttcaagcaaaatgtaatgccatattcaagtttaagttataaggtgttcgatttgtcatttttaacttatgagggaaccactcataaggaaaagaaaaatgtggctaagaaagacttgcgtgatgatctgtttaataaagagggcattaaagctgtaggtaatattggtttatatcgtattggaattagagtagataggaataatccaaaattgcaattggcggatagtgtagagcttatcattccaggaacattacgcagacatttaggtggtagtgggtgctctcctgtcaattatgctatattaagcaaatgtatatccaaagatgatttcgaaaccctcacaaagctgatattataattggagtcagcaatgaaggatggtgatatgccccagatcatcaaagaaatatgtgcagagcgccctgatataggggcgctagcttgctatttgtatgatgaaattggtgtgagagcaaagaaatcgcctaatatagctctgagttataaagatttatttagtatcgttaatggttataaaggatgtatacaacctgaagcatatgagcaggttgtgtacccagctatacaaattctttgtagtccaaaggttgagtttttaaaactcaattattggtttattgatgattttcatgatcctattgagcttgagttagaagatgttatagaggctgaaattaatcaatctttagtaaacccatttacaggggagattatgtatgactataagtccttcgtctttcctttttttacattagatgaatctaaattaaaggatattgtctgatgttaaaaatgtctgcaccaatgagtttagctgaaattgataatgatatttttcttcagcgtatcaatgcttctattactcgcgttaggtttgctctccagtcgtatgagaacttcaaacagtttgtaagaattgagcttgattctgctgtacaggcaattgaggaaaattcaaataaattgaattttgatttaacagaagatcagcttactttaattttactggcaaatataaaaaataaagatatgggaattgaagcatatcatgaaaataatcaacgaggtcattgtgatataacaataaagttgaatagatttacttggcatggcgaggccaaaaaacacactggttcatatagttatttatttaaagggtatgcacaactcactgagcgatatagcactggtactgtagacagtgcaagtggtgggttaattatatatacgcgtaataaaaaatgtaatgaaatgatgactaagtggaaggctcatttagataaatcggctccaagaattcatgcttgtaagtctatctcgataactccttgtaagagaaacccattggttttttacagtcaacatactcacactgttagtcaacttaattatgaggttatacactaccctgtaaacctttatcatgagcctgtagactcagagctttgaatatgatttttgttagttttataacatatataatgtaaaaacctgcatatgcaggtttttaagattattgaatatctaagttataatcctcaaaatgtattacatcctcctttaaccagttgttcagctctaataggctcttttgtagtggcctcaattcatttcgcacaaaaactcgactcgccttctccacatccccaaaacccccaacattattcggcataatccccatcatttgcggcggtacgcggtgtgctgccatcatgtcatcgcgactgacatttttgatattcaaaaactcatccttcgctgcgacctctgacaatgggataatctgaagcccgtcctttttgccgttaggcgagtacataaacaggttgcggaagttgcccggacctttggcgcttttcatcgcattgcggaggttgttcacatcttcctggttctgcgcggcatcggtcatgtacatgatgaagcctgcatgactgccgttaatgtaatacttgcggcggaacagcgtggcggactcgttgagcagggctgacggaatggcagaaagataacctggcaggccgtagatctcctggttgatgtccggttccatcagatgaaaaatgctgcctttcgtgaactgatacggctgggttgtcataccgtattgcacaaaccagtaggtatccaggtctaacccgcgtcgggtgtattttgccagtgcaggctcaagggcgataacttcaccgaagcggttcgtgcgtttctccaggtaggcgttaccaaaaaccagatagtcctgcacaaaacgtgaaaaagcctgctggctgagcagcgggtgagggatgtaggtgctggtcagaatgttgcacttcactgcaatcggtgagctgtgatgcacggcggcgcggaaggttcgcgccagtccgtcgaaactcacaggcggctcataccaacgatccatctgtacgcattccacatagtccagcagttcgcggcggtccagaacaggaacgggatcaccgaagctgaatgcttcggctgaagtctggcttttatgctggatctgtttcgtcgccgcagctcggttcttcttactctttcccatcaaaaaatctccacaatattgctggtattggcggactcgccctgcagcggttcgttaaacagtgcgtgcattgttgcccaggccagatcggcatggctggcttcttcgctgcggctggcttcataggtcgggcggttgccactggcagtggtagcgcgacggattgccataaatgactgcgcaatgtcggtgtgcccggcgtcaaactccagacggcggtggctgataatgtcgtaggccttgagtaccagggcgtttttaacgttggggttgtagacaaactccctgacggcaggaaaaaacgctttcacgttctcgtaaaccccgtgaccgacgccggttgagtcgataccgatgtatgtcacgttgtactgttcagtcagttttttgatggcgtcagcctgggcgcggaagtccatcccgcgccactggtgacgctcaagaatgcggaacttaccgcccggcacggctggcggtgccaccaccacgcacccggcgctgtcgccgttttgcgtaccttttgccgggtcataaccgatccacacttcgcgccagccaaacgggcgcagggctagtgcatgaaagtcggtccagacttcccagctgtccaccatgcacgcctgcagctcgctgagcggaaacacggacgcgagatcgtccacaaactcgcacatcagcaggttctggtattcgtccgggctgtactccatgcgcaactggtcgagatcgaacaggttacatccgccgcgcacagcatcttccacggtgactatctggcggtattgcccgtctgcgcacagcaggccgggggccagattgctgtgggacaggtcgatgtccaccttatcggctttgttgcgcccacggttgaacagcgcaccggaccagaacggataagcactgtgtgtcaggctggatggtgtggaaaaataggtttgtcgccattttttgtgaatagccataccggaagccactttgcgcagctcctggaatttcggtatccagaaatattcatccagatacaggttgccgtggtaactctgggccgtgcgggcattggtgccgaggaagtaaagcgtagccccgttaggaagcaccatcggatcgcctttcagctccacttccacttctttggcgaagtcgatgatgtactgtttaaagacgtgggcctgtgccttactggcggaaaggaaaatctggttacgtccggtaagcagggcgtcaatcagggcttcacgggcaaagtaaaaggtcgcgccgatctggcgtgacttcagcaggttgcggatgcggttggtttttccggcttcccaccagtggcgctggtagttgaacatggaggaatggaagatttcttccagcttctcaatctgttcatcggtgaaaacgttcttttccggctgacgacgcgggcctttgttgcggttggcgacgttagggtttaagtcggcttcgttgccgccattgttaaacttgccgatccgcgcgtggcgctccgactggcgcgccagcaggtcaatctctttgaaatctttcccttctttgtgctccttcatgatgagctggcagtagcgtgcggcggtggtgagctgcatctgatccagcggcccatagtcaccccacttgtcgcgtttcttccagctgtgaacggttgcaactttctcgcccagcatttcagcaatgcgggctacgcgatatccctgaaagtacagcagcatggcctgccgacggggatcgagatctgcggatgtcagtgtggtgttcatggcacaaacctacagccttgaatgaaggctttccccgcctgcggtttgtgtggttgtcggtacaaataccgcgcattgtttcactgccctcatcaccgcaaccataaggctccagtaagttttttctaacggagcacggctcatgacagtgaaagcaaagcgttttcgcatcggggtggaaggtgccaccaccgacggacgcgaaatccagcgtgaatggctggaacagatggcagccagctacaacccggcagtgtataccgcgctgattaaccttgagcacatcaagtcttatctgccggacagcacctttaaccgctacggcaaggtaacggcgctgtttgctgaagaaatcacggaaggtccgctggcaggcaagatggcgctgtatgccgacgttgagccaacggagtccctggtggagctggtgaaaaaaggccagaaattattcacctctatggaagtcagcccgaagttcgctgatacgggcaaagcctacctggttggcctggctgccactgatgatccagccagtctgggtacggaaatgctgacattcagcgccagtgcagcccataacccgctggcaaaccgcaagcagaatcccgccaatctctttaccgccgcagaggaaacggtgatcgaactggaagaaatccaggatgacaaaccgtccctatttgcccgcgtcacggcgctgttcaccaaaaaagagcagtccgacgatgcccggttctctgatgtgcataaggccgtggagctggtcgccactgagcagcaaaacctgagcgcacgcaccgaaaaatccctgtctgagcaggaagaacgcctgtctgagctggagacagccctgcaggtacaacaggccgcctttaacgaactggtggacaagctgagccatgaggactgccgccaggactaccgccagcgtgcaacaggcggtaacgcccccgctgacactctgaccaattgctgatggagcataaaacccgatgaagaagaatacccgctttgcttttaacgcttacctgcagcagctggcgcgtctgaacggtgtggcagttgaagaactgtccagcaagttcaccgtagagccgtctgtgcagcagacgctggaagaccagatccagcagtccgccgctttcctgacgctgattaacgtcacgccagtgactgagcagtccggtcagctgctggggctgggtgttggcagcaccattgccggaaccactgacaccaccgcgaaagagcgtgaacctgtcgatccgacgctgatggtcgatgtggaatacaaatgcgaacagaccaactttgacacggtgctgacctacgcgaagctggacctgtgggcgaagtttcaggatttccaggtgcgtatccgtaacgccatcgtgaaacgtcaggcactggaccgcatcatgatcggctttaacggcgtgaagcgtgcgaaaacctccaaccgcagcgaaaacccgctgctgcaggatgtgaacaaaggctggctgcagaaaatccgtgaggatgcaccggatcacgtcatgggcagcaccaccacgggcggtgaaaccacaccgggtgcggtgaaagtcggtaaaggtggcgaatatgccaacctggacgccgtggtgatggatgccgttaatgagcttatcgacgtggtctaccaggacgatgacgatctggtggtgatttgcggtcgtgaactgctgtctgacaagtatttcccgctggtcaacaaagagcaggaaaacagtgaaaaactggcagccgatatgattatcagtcagaaacgcatgggcggtctgcaggccgtgcgtgcgccgttcttcccgccgaatgcgctgctgatcacccgtctggataacctgtccatctactggcaggaagatacccgccgccgttcagttatcgacaacccgaaacgtgaccggattgaaaactttgaatctgttaacgaagcctatgtggttgaggactaccgctgcgccgcactggtggaaaacatccagattggcgatttcagcgccgccgcagcagaagccggagcgtaacctatgagcctgagtcccgcacggcagcatcgcctgcgcgttcaggctgaacaggccgcccgtgaaggcggcagtgttcgccacgcgtcgggctatgacctgatgctgctgcaactggcggaagaccgccgccgtctcaagggcgttcagtccacggtgaaaaaagcggaaataaaggtggagctgctgccgaaatatgccgcctgggcggagggcgtcctggctgccggaggcgctcaacaggatgacgtgctgatgtacgtgatgctgtggcgcattgatgccggagattatgccggggcgctggagatcgggcgtcatgccctgcgtcatggctgggtgatgccgctgggtaaccgcaacgtgcagaccgtgctggcagaggaaatggcagatgcagcgcagagcgcaatgcttgccgccaccggctttgatgccgatctgttgctgcagacgctggagctgacagacggtctggatatgccggaccagtcacgggcgcgtctgcataaagcgattggcgctgtcctgagtgaaagcaatccggcttccgcccttaatcatctcaaccatgcgttacagctcgatccccgctgtggcgtgaaaaaagacaaacagcagctggagcgcagactgcgcaatgacagccgctgacagaacgtgcccccgcgcacgggcggcacggggtggcgaaaggcaccgccacatcaaaaccccgtccaccgccctctatttcaggagaaagcagcatgaagtttgttgcgccagaacaggcaccggaacaggcggaaatcatcagaaatacgccgttctggcctgatgtggacctgtcggagtttcgcagcgtgatgcgcactgacggcacggtgacgcagccgcgtttaaagcaggttgcgctgtcggcaatttcggaggtcaacgcagagctgtatgagtttcgcagacgccagcagatgctggggtatgcctcgctggcagaggttccggcagaacagctggacgggaaaagtgagcgcattcagcactatttcaacgcggtttactgctgggcacgcgccatgctcaacgaacgataccaggactatgacgccacggcatccggtgtgaagcgaggcgaagaactggcagaaaccagcggtgatttgtggcgtgacgcccgctgggccgtcagccgggtgcaggatgcgccgcactgcacagtggagcttatctgatgaaagtacgtgcgcatcagtatgacacggtggacgcgctttgctggcgtcattacgggcgtacacagggtgtcacggagcaggtactgaaggcaaatccggggcttgccgaacacggcccctttttacctcacgggctgcaggtggagctgccggacattccgaccaccaccaccgtgcagaccgtccagctatgggactgaattatgacacttgagcgaatcagcgcctttatcacgtattgcatcgccgtcgtgctggcctggctgggcgatttgtccatcaaggatgcctcaacgctggggggcctgatgattggtgtgctgatgctggctatcaactggtactacaaacacaaagcctaccagcttctgcgtgacgggcagatctcgcgggaggattatgaatccatcaatcgttaaacgctgccttgtcgggaccgtgctggctattgctgccacgctgccgggttttcagcagcttcacacctccgtggagggactgaaactgattgccgattacgaaggctgtcgtctgcagccgtatcagtgcagcgcgggtgtctggaccgacggcattggtaatacgtcgggcgtcattcccggcaaaaccattacggaacgacaggcagcagaagggctgatctccaacgtgctacgtgtggagcgggtgctggaaaggtgtgtgaagcaacagccgccgcagaaggtgtatgacgcggtggtgtcgtttgccttcaacgtgggaacgggcaatgcctgcagttccacgttggtgaaattgctcaaccagcggcgctgggcggatgcgtgccgacagttgccgcgctgggtgtatgtaaaaggtgtgtttaatcaggggctggataaccgccgtgcgcgggagatgtcctggtgtttacagggagcaaactgaaatgaaaaagaaattaatcagcggactgtttctgatgttatggatggcgctgttaatcgcggcaatggtgtatccgcaggggatttttccggtactggcagcgtccggcgtttgggtagcctgtttgctgacatgggcggtaattccggtagcactggctgcgttaattaagaatggcccgctctggcaggagttaaggggatctttgctgaagacaattacccgaaaagaaaacgtatttatcagttgggtgatgcgattgctgattgtcgtaagtctcgcctggacggggtgggctattaccctggtcttttatctgctgaccgttattgccttctggatcacccgtaatcagatggcgcaacaggtagcagcatgaaccggttgctgctggttgtgctggcgttattactggcggcgctgggctggcagacgtggcggctggctgatgccagccagaccattagcacgcaggcaggcgagctgcagagcaaaagccaggcactggcaaagagcaacagccagcttattagcctgtccattctgactgaaaccaataaccgggagcaggcgcggctctatgccgaagcagaacagaccagcgcgctgctgagacaacgacaacaccggatcgaggaactgaaacgtgagaacgaggatttacgccgctgggctgatactcctttgcctgctgacattatccggctgcgggaacgttcggcactcaccggaggtgcagcttatcgtcagtggttgtccgcgagtgacaccgtgtcggctggagcaggcagcgccgcgcactaacggtgatctgaacgcgttgttggatgaaacggaggccgcctgggcggtctgtgcagacaaagtggacatgattattgcgtgtcaggagcgaaacagtgaacaaaccacaatccctgcgccacgccctcaataaagcggtgccttatgtccgcaataacccggacaaactgcatctgtttgtggataacggttcgctggttgccacgggggccagctccatgtcatgggagtaccgctataccctgaacgtggtgatagaggatttcagtggcgaccagaatctgctgatggccccggttttactgtggcttcgggataaccagcccgatgccatcaataacccggcgttacgggaaaagctattcacctttgatgtggatattttgcgcaacgatgtctgtgatatcagccttaacctgcaactgacggaacgtgtgctggtcagcactgacggcagtgtgtcgagcgttgaagctgtagcagaacccgatgaacctgaagaaatgtggacggtgaaacgtggctgaactgcagaaggtggacgactggctgagtgccttgctggcgaatctggaaccagccacgagaagccgcatgatgcgccagctggcgcaggaactgcgccggacacagcagcagaatatcaggatgcagcgcaatccagatggcagcagttatgaaccgcgcagggtaacagcacgcagcaagaaggggcgcatcaaacgtcagatgtttgcaaagctgcgcaccacaaaatacctgaaaactgccgccagcgccgactctgccagcgtgcagtttgaaggcaaggtacagcgcattgcccgtgttcatcactacggcttacgtgatcgcgtcagccgcaaaggaccggaggtccgttacgcagagcgtcgccttctgggtgtaaatgatgatgttgaggcaatgacccgcgacatgattctgcaatggctggcggggtgatttttgtatcagcactgatacaagttgcagcactgccgcctttcttcccctgatggcaacctttccctatgaacgcacaattaaccgaaatcatgcgccttatcaccaacctgatccgcacaggggtagtcaccgaagtggacaggacaaactggctttgccgggtgaaaacgggcgaccttgaaactaactggattaactggctgacgctgcgcgcgggtaatgcccgcacatggtggaaaccatcagaaggtgagcaggtggtgctgctgagtctgggcggcaatctggagactgcctttgcgctgcccgctgtctattcgaatcagttcgcaccaccgtcgacgtcggcggacgcctgcgtgacagaacatcctgacggtggctggtttgaatatgaacccgccaccgggcgctggtatgtcaggggcatcaaatcaatggtcattgaggccgctgacaacatcaccatgaaaaccagtgagtttgtactggaggctgaccgcacgcgcattaacagcgaagtggtgatcaatggtggcgttacccagggcggcggagcgatgagttctaacgggatcgtggttgatgcgcatcagcatactggcgtcctgaaaggcggcgatacaaccggaggcccggtatgacgctttatagcgggatgaacaatacaagcggcaaagtcattactgatattgaccatctgcgccagtcggtgcgggacattctgctgacgccgcagggtagccgcattgctcgccgtgaatatggttccctgctgtcggcactgatagaccagccacaaaatccggcattacgcctgcaggtcatgtcggcagtgtatgtggcgctgagtcgctgggagccacggatgacgctggattccatcaccatcaacagcaattttgtcggttcaatggtggtggcgctgagcgggcggcgtaataacggtgtgcctgtttccctttccgtatcaacaggagcagagaatggcagtgattgacctttcgcagttgcctgcgccgcagattgtggatgtgccggactttgagacgctgcttgccgaacgcaaggccgaatttgttgcgcttcatccgaaagatgagcaggaagcagtgatccgcacgctggaactggaatctgaacccgtcaccaaattgctgcaggagaacgcttaccgtgagttgcttctgcgccagcgcattaacgaagccgcgcaggctgtgatggtggcttacgcgatgggcagcgatcttgaccagctcgctgccaactacaacgtgaaacgcctgacggtgacgcctgctgataatgacgctgtgccgcccgttgcagctgtgatggaaagcgatgaagcgttacgcctgcgtgtgcctgcagcctttgaagggctttcagttgcggggccaactgcagcttatgaatttcatgcccgaagcgccgacggtcgggtggcggatgccagtgcaaccagcccggcacctgcagaggtggtgctgactgtccttagccgcgaaggcgatggaactgcagaaaaagacctgctggacgtggtggaaaaagctctgaacagtgagaacgtccgcccggtggctgaccgtcttacggttcgcagcgcagaaatcatcccgtatcgcgtggaagccaccatttttctctatccgggaccggaagcagagccggtaatggcagcggcaaaagccagcctgcagaagtacattgccagtcagacgcgtcttggtcgggatattcgccgtagcgccatctttgccgccctgcatgttgagggtgtgcagcgtgtggagctggcttctcctctggcggatgtggtcctgaacaaaacacaggcggcatcatgtacgcagtggagcgtaaccaacggaggaacggatgaatagtctgctgccaccgggttcaacttcactggagcgccgactggcgcaaacctgtagcgggatttctgatctgcaggtgccgctgcgtgacttgtggaatccggctacctgtccggtcagcttcctaccttatctcgcctgggcgttctctgtggatcgctgggacgagggctggacagaaagcgtcaaacgccaggtagtgaaggatgctttttatattcatcagcataaaggaaccaccagtgccgtgcggcgggtggtggaaccgttcggattcctgatccgcattattgagtggtggcagaccggagaaacaccgggcacgtttcgcctggatatcggcgtgcaggaccagggcatcactgaagatacctatctggaacttgagcggctgataagcgatgccaaaccatgtagccgtcacatgatcggcatgtccatcaatctgcagaccagcggtccgcattgggtgggggccgccagctatcttggcgaagaaatcacgatctatccgtatatcaacgaaacaattatttctggcggcaccgcgcatgaaggcggggcggtccatgttattgacacaatgagagtgaatccatgagcacaaaattttataccctgctgacggatattggtgcggcgaaacttgccagcgccgccgcgctcggtgtgccgctaaaaattacccatatggcggtcggcgatggcggcggagtattgccaacgccagactcaaagcagactgcactggtaaatgagaaacgccgggctgcgctgaatatgctctatatcgacccgcagaacagcagccagattattgccgaacaggtgatccctgaaaacgagggcggttggtggatacgtgaagtgggcttgtttgatgagtccggggcattgattgccgtgggcaactgcccggaaagctataagccgcaactggctgaaggtagcgggcgcactcagaccgtgcgcatggtgctgattaccagcagcacggacaatatcaccctgaaaatcgaccctgccgtagtgctggcaacccgcaagtatgtggatgacaaggcactggagctgaaggtgtacgcggatgatcagatggcaaaacatcttgccgcaccggacccgcattcacagtatgcacccaaagaaagtccgacgtttaccgggacacccaaagcgccaacgccagccgcagggaataacaccacgcagattgcgaccaccgcgtttgttcaggcggctctgacggctcttattaatggtgcgccagccacgctggacacgctgaaagaaatagccgcagccattaacaatgatccgaaattcagtaccaccattaacaatgcgctggcactgaaagcgccgctgtcgagtccggcactcaccggaacgccaaccgcacctactgcggcacagtcggtcaacaatacacagattgccaccacggcatttgtgaaatcggcgattgcggcaatggtgggttctgcacctgcggcactggatacactgaatgaactggctgcggcgctggggaatgacccgaactttgccacgacaatgcttaatgcgctggcaggtaaacaaccgctggacaatacgctgactaatttgagtggaaaggatgtagctggtcttctcgcataccttggtttgggagaaggctcagcattacccgttggcgtacctgttccgtggccttcagccacaccgccgacaggctggctgaaatgcaacggtgccgctttttctgctgaagaatacccggaactggcaaaggcttacccgacaaataaattgcctgatttacgtggtgagtttattcgtggctgggatgacgggcgtggagtggatagcggtcgtactttattaacgaatcaagagcatgcagtaatttctcataatcatggaatacctacaaaagtggggtcagttactaatatcccgtatggaatagaacaggttatatctgatgaaaccattttttcatcagcaaaaacagttggtgtggattactggtctaacagtgaaagagtttttacttataccactggtggaagaaatggtgctgaatcagtgagttcacctgatgcctcctctttaattaaagaaaccagaccacggaacctggcatttgcgtatatcgtgagggctgcataatggattacgccgtattaaataacgaatttatcgccacccaggcaggaaatattactgtttataactatgatggtgaaacacgggaatatattttcacatcaactgaatatcttgctgtgggtgtcggcattccggcatgctcctgtttagatgctcctgactcatataaagctggttatgcaatctgccgttctgcagattttaactcatgggtatatgtgccagaccaccgtggtgaaacggtatatagcactgaaacaggagaatcaaaagaaatcacagctccgggtgattaccctgaaaatacaaccactatcgccccgttaacgccattcgataaatgggatggtgagaaatgggtgaccgatactgaggcacagcatagcgctgcagtccgttgttccgtgtcagtggtggcgcattatagggagttattccggcctgacaagcgaaaaatataaaaactttatcgttcgctcacttttcaggcaaaacatcttaaatatagtcttttccgtctaacttatagacaaaaacgagccccgaagggctcgttttatcatttactggacggcgacaatccggtcttcattaacttccaggcgaatcactttacccggaaccaattcaccagacagtatttgctgtgccag
